(19) United States
(12) Patent Application Publication
(10) Pub. No.: US 2025/0243514 A1
(43) Pub. Date: Jul. 31, 2025

(54) COMPOSITIONS, METHODS, AND SYSTEMS FOR DNA MODIFICATION

(71) Applicant: The Trustees of Columbia University in the City of New York, New York, NY (US)

(72) Inventors: Samuel Henry Sternberg, New York, NY (US); Chance Meers, New York, NY (US); George Davis Lampe, New York, NY (US); Rimante Zedaveinyte, New York, NY (US)

(21) Appl. No.: 19/177,072

(22) Filed: Apr. 11, 2025

Related U.S. Application Data
(63) Continuation of application No. PCT/US2023/076608, filed on Oct. 11, 2023.
(60) Provisional application No. 63/584,414, filed on Sep. 21, 2023.
(60) Provisional application No. 63/489,495, filed on Mar. 10, 2023.
(60) Provisional application No. 63/379,082, filed on Oct. 11, 2022.

(51) Int. Cl. C12N 15/90; C12N 9/22; C12N 15/11

(52) U.S. Cl. CPC C12N 15/902; C12N 9/22; C12N 15/111; C07K 2319/09; C12N 2310/20

(57) ABSTRACT

The present disclosure provides systems, compositions, and methods for nucleic acid modification. More particularly, the present disclosure provides systems comprising a TnpA protein, a TnpB protein, an IscB protein, or a combination thereof, and methods using thereof.

### CROSS-REFERENCE TO RELATED APPLICATIONS

[0001] This application is a continuation of PCT/US2023/076608, filed Oct. 11, 2023, which claims the benefit of U.S. Provisional Application Nos. 63/379,082, filed Oct. 11, 2022, 63/489,495, filed Mar. 10, 2023, and 63/584,414 filed Sep. 21, 2023, the contents of which are herein incorporated by reference in their entirety.

### STATEMENT REGARDING FEDERALLY SPONSORED RESEARCH OR DEVELOPMENT

[0002] This invention was made with government support under GM143924 awarded by the National Institutes of Health, and 2239685 awarded by the National Science Foundation. The government has certain rights in the invention.

### FIELD

[0003] The present invention relates to compositions, methods, and systems for DNA modification. In particular the present invention provides compositions, and systems comprising a TnpA protein, a TnpB protein, an IscB protein, or a combination thereof, and methods using thereof.

### SEQUENCE LISTING STATEMENT

[0004] The content of the electronic sequence listing titled COLUM_41375_305_SequenceListing.xml (Size: 811,889 bytes; and Date of Creation: Apr. 11, 2025) is herein incorporated by reference in its entirety.

### BACKGROUND

[0005] DNA transposition is a ubiquitous phenomenon occurring in all kingdoms of life during which discrete segments of DNA called transposons move from one genomic location to another. Insertion sequences (IS) are the simplest autonomous transposable elements. While they tend to be short (<2.5 kb) and carry only those genes needed for transposition, if placed flanking a DNA segment, many are able to mobilize the intervening genes. ISs can be classified into groups or families based on the general features of their DNA sequences and associated transposases. Insertion sequences of IS200/IS605 family contain the genes for their transposition and its regulation: a TnpA transposase, which is essential for mobilization, and an accessory gene, e.g., TnpB or IscB, which are evolutionary ancestors to CRISPR-Cas9 and Cas12 enzymes. These transposon components offer an expansion on genome editing options.

### SUMMARY

[0006] Provided herein are engineered systems comprising a TnpA protein, a TnpB protein, an IscB protein, or a combination thereof. In some embodiments, the systems comprise at least one guide RNA, or one or more nucleic acids encoding thereof, wherein the at least one guide RNA is complementary to at least a portion of a target nucleic acid.

[0007] In some embodiments, the systems comprise a TnpA protein, a TnpB protein, an IscB protein, or a combination thereof, or one or more nucleic acids encoding thereof and optionally, at least one guide RNA, or one or more nucleic acids encoding thereof, wherein the at least one guide RNA is complementary to at least a portion of a target nucleic acid.

[0008] In some embodiments, the TnpA, TnpB, and IscB protein is derived from Geobacillus stearothermophilus, Clostridium botulinum, Clostridium senegalense, or Clostridioides difficile.

[0009] In some embodiments, the TnpA protein, TnpB protein, IscB protein are derived from an IS607-family element. In some embodiments, the TnpA protein, TnpB protein, IscB protein are derived from an IS200/IS605-family element.

[0010] In some embodiments, the TnpA protein is a serine-family recombinase. In some embodiments, the TnpA protein is a tyrosine-family recombinase

[0011] In some embodiments, the TnpA protein comprises any amino acid sequence having at least 70% identity to any of SEQ ID NO: 11, 21, 25, and 38-41. In some embodiments, the TnpA protein comprises any amino acid sequence of any of SEQ ID NO: 11, 21, 25, and 38-41.

[0012] In some embodiments, the TnpB protein comprises any amino acid sequence having at least 70% identity to any of SEQ ID NOs: 1-4, 6-9, 17, 22-24, 30-37, and 42-50. In some embodiments, the TnpB protein comprises any amino acid sequence of any of SEQ ID NOs: 1-4, 6-9, 17, 22-24, 30-37, and 42-50.

[0013] In some embodiments, the IscB protein comprises any amino acid sequence having at least 70% identity to any of SEQ ID NO: 5 or 10. In some embodiments, the IscB protein comprises any amino acid sequence of any of SEQ ID NO: 5 or 10.

[0014] In some embodiments, the system comprises a TnpA protein having an amino acid sequence with at least 70% identity to any of SEQ ID NO: 11, 21, 25, and 38-41, or a nucleic acid encoding thereof, a TnpB protein having an amino acid sequence with at least 70% identity to any of SEQ ID NOs: 1-4, 6-9, 17, 22-24, 30-37, and 42-50, or a nucleic acid encoding thereof, an IscB protein having an amino acid sequence with at least 70% identity to SEQ ID NO: 5 or 10, or a nucleic acid encoding thereof, or a combination thereof; and optionally, at least one guide RNA, or a nucleic acid encoding thereof, wherein the at least one guide RNA is complementary to at least a portion of a target nucleic acid.

[0015] In some embodiments, the system comprises, consists of, or consists essentially of a TnpA protein. In some embodiments, the system comprises, consists of, or consists essentially of a TnpA protein and at least one guide RNA.

[0016] In some embodiments, the system comprises, consists of, or consists essentially of a TnpB protein. In some embodiments, the system comprises, consists of, or consists essentially of a TnpB protein and at least one guide RNA.

[0017] In some embodiments, the system comprises a TnpA protein and a DNA nuclease capable of inducing site-specific single or double strand breaks, or one or more nucleic acids encoding thereof. In some embodiments, the DNA nuclease is a CRISPR/Cas nuclease, an RNA-guided DNA nuclease encoded by insertion sequences, and/or a homing endonuclease. In some embodiments, the CRISPR/Cas nuclease is Cas9 or Cas 12. In some embodiments, the DNA nuclease encoded by insertion sequences is IscB, IsrB, TnpB, or Fanzor. In some embodiments, the homing endonuclease is ISce-I, ICre-I, or HO.

[0018] In some embodiments, the system comprises a TnpA protein and at least one of the TnpB protein or IscB protein, or one or more nucleic acids encoding thereof.

[0019] In some embodiments, the system further comprises at least one guide RNA.

[0020] In some embodiments, the at least one guide RNA comprises a scaffold sequence capable of associating with the TnpA, TnpB, IscB protein, or combination thereof and a guide sequence complementary to at least a portion of a target nucleic acid. In some embodiments, the at least one guide RNA is provided on an omega RNA. In select embodiments, the at least one guide RNA or omega RNA is synthetic.

[0021] In some embodiments, the TnpA protein, TnpB protein, and/or IscB protein are at least partially catalytically inactivated. In some embodiments, the TnpA protein, TnpB protein, and/or IscB protein are fused to an effector polypeptide. In some embodiments, the effector polypeptide is a nuclease, a recombinase, an epigenetic modifier, a transposase, an integrase, a resolvase, an invertase, a protease, a DNA methyltransferase, a DNA demethylase, a histone acetylase, a histone deacetylase, a transcriptional repressor, a transcriptional activator, a DNA binding protein, a transcription factor recruiting protein, a deaminase, dismutase, a polymerase, a ligase, a helicase, a photolyase, a glycosylase, or any combination thereof.

[0022] In some embodiments, any or all of the TnpA protein, TnpB protein, and IscB protein comprise at least one nuclear localization sequence (NLS).

[0023] In some embodiments, the TnpA protein, TnpB protein, IscB protein and the at least one guide RNA are encoded by one, two, three, or four nucleic acids. In some embodiments, the one or more nucleic acids comprises one or more messenger RNAs, one or more vectors, or a combination thereof.

[0024] In some embodiments, the system further comprises a target nucleic acid.

[0025] In some embodiments, the target nucleic acid is flanked on the 5′ end by a transposon-adjacent motif (TAM) sequence. In some embodiments, the target nucleic acid is flanked on the 3′ end by a transposon-encoded motif (TEM) sequence. In some embodiments, the TAM sequence is TT(C/T)A(A/T/C). In some embodiments, the TAM sequence is TTTAT or TTCAT. In some embodiments, the TAM sequence comprises TGG.

[0026] In some embodiments, the system further comprises a donor nucleic acid. In some embodiments, the donor nucleic acid is flanked by at least one of a left end sequence and a right end sequence. In some embodiments, the donor nucleic acid is embedded in a group I self-splicing intron. In some embodiments, the donor nucleic acid is an engineered group I intron comprising an exogenous cargo nucleic acid sequence. In some embodiments, the group I intron is derived from C. botulinum.

[0027] In some embodiments, the system is a cell-free system.

[0028] Also provided herein are compositions and cells comprising the disclosed systems. In some embodiments, the cell is a prokaryotic cell. In some embodiments, the cell is a eukaryotic cell. In some embodiments, the cell is a mammalian cell. In some embodiments, the cell is a human cell.

[0029] Further provided are methods for DNA modification comprising contacting a target nucleic acid sequence with a system disclosed herein. In some embodiments, the modification comprises cleavage of the target nucleic acid, excision of the target nucleic acid, integration of a donor nucleic acid, or a combination thereof.

[0030] In some embodiments, the target nucleic acid sequence is flanked on the 5′ end by a transposon-adjacent motif (TAM) sequence. In some embodiments, the target nucleic acid sequence is flanked on the 3′ end by a transposon-encoded motif (TEM) sequence. In some embodiments, the TAM sequence is TT(C/T)A(A/T/C). In some embodiments, the TAM sequence is TTTAT or TTCAT. In some embodiments, the TAM sequence comprises TGG.

[0031] In some embodiments, the donor nucleic acid is flanked by at least one of a left end sequence and a right end sequence. In some embodiments, the donor nucleic acid is embedded in a group I intron. In some embodiments, the donor nucleic acid is an engineered group I intron comprising an exogenous cargo nucleic acid sequence. In some embodiments, the group I intron is self-splicing. In some embodiments, the group I intron is derived from an IS607 element. In some embodiments, the group I intron is derived from C. botulinum.

[0032] In some embodiments, the target nucleic acid sequence is in a cell and the contacting a target nucleic acid sequence comprises introducing the system into the cell. In some embodiments, the cell is a prokaryotic cell. In some embodiments, the cell is a eukaryotic cell. In some embodiments, the cell is a mammalian cell. In some embodiments, the cell is a human cell.

[0033] In some embodiments, the introducing the system into the cell comprises administering the system to a subject. In some embodiments, the subject comprises a disease or disorder. In some embodiments, the methods comprise treating or preventing a disease or disorder in subject comprising administering an effective amount of the system disclosed herein to the subject in need thereof.

[0034] Other aspects and embodiments of the disclosure will be apparent in light of the following detailed description.

### BRIEF DESCRIPTION OF THE DRAWINGS

[0035] FIGS. 1A-1D show the distribution of IS200/IS605-like elements in Geobacillus stearothermophilus. FIG. 1A, Schematic of a representative IS200/1S605 element. TnpA encodes a Y1-family tyrosine transposase responsible for DNA excision and integration; tnpB/iscB encode RNA-guide nucleases whose biological roles are unknown. FIG. 1B, Schematic of a non-autonomous IS element encoding TnpB and its associated overlapping ωRNA; a structural covariation model is shown in the inset. The green rectangle indicates the transposon boundaries, and the guide portion of the ωRNA is shown in blue. LE and RE, transposon left end and right end. FIG. 1C, Genome-wide distribution of IS200/IS605-like elements in G. stearothermophilus strain DSM458. Five distinct families are shown (ISGst1-5), based on sequence similarity of transposon ends and nuclease encoded. FIG. 1D, Read coverage from small RNA-seq data of Gst strain ATCC 7953, demonstrating expression of putative ωRNAs from each of the indicated ISGst families. TnpB-associated ωRNAs are encoded within/downstream of the ORF, whereas IscB-associated ωRNAs are encoded upstream of the ORF.

[0036] FIGS. 2A-2F show TnpA catalyzes DNA excision for multiple families of IS elements. FIG. 2A, Schematic of ISGst2 element, highlighting the subterminal palindromic transposon ends located on the top strand (top). Transposon-adjacent and transposon-encoded motifs (TAM and TEM) are highlighted in yellow and orange respectively, DNA guides are shown in red, and their putative base-pairing interactions are indicated; dotted lines indicate transposon boundaries and thus the sites of ssDNA cleavage and re-ligation. The donor joint formed upon transposon loss is shown at the bottom and comprises the TAM abutting RE-flanking sequence (denoted with N's). LE is SEQ ID NO: 204; RE is SEQ ID NO: 205. FIG. 2B, Schematic of heterologous transposon excision assay in E. coli. Plasmids encode TnpA and mini-transposon (Mini-Tn) substrates, whose loss is monitored by PCR using the indicated primers. FIG. 2C, TnpA is active in recognizing and excising all five families of ISGst elements, as assessed by analytical PCR. Cell lysates were tested after overnight expression of TnpA with the indicated ISGst mini-Tn substrates, and PCR products were resolved by agarose gel electrophoresis. Marker denotes a positive excision control; U, unexcised; E, excised; M denotes a Y125A TnpA mutant. FIG. 2D, Excision products from c exhibit the expected ‘donor joint’ architecture, as demonstrated by Sanger sequencing. Dotted lines denote the re-ligation site following excision; the TAM is highlighted. SEQ ID NOs: 206-210 for ISGst1, ISGst2, ISGst3, ISGst4, and ISGst5, respectively. FIG. 2E, Transposon excision requires intact LE and RE sequences, as seen via testing of the mutagenized mini-Tn substrates indicated on the right. Experiments were performed as in c using ISGst2. Transposon ends and TAMs are indicated with green triangles and yellow boxes, respectively; M denotes a Y125A TnpA mutant. FIG. 2F, Transposon excision is dependent on cognate pairing between compatible TAM and guide sequences. Excision experiments were performed as in FIG. 2C using ISGst2 with the indicated mutations in the TAM/TEM (blue) or DNA guide (red). Substrate 4 has mutations to cognate sequences derived from IS608.

[0037] FIGS. 3A-3H show TnpB and IscB target ‘donor joint’ molecules excised by TnpA. FIG. 3A, Schematic representation of each IS family (colored rectangle), alongside homologous sites from related Gst strains that lack the transposon insertion. TAMs are highlighted in the donor joint sequences (SEQ ID NOs: 211-214 for ISGst2, ISGst3, ISGst4, and ISGst5, respectively) shown below each element. FIG. 3B, Schematic of E. coli-based plasmid interference assay. Protein-RNA complexes are encoded by pEffector, and targeted cleavage of pTarget results in a loss of kanamycin resistance and cell lethality on selective LB-agar plates. FIG. 3C, G. stearothermophilus TnpB and IscB homologs are highly active for RNA-guided DNA cleavage, as assessed by plasmid interference assays. Transformants with a targeting (T) or non-targeting (NT) ωRNA-pTarget combination were serially diluted and plated on selective media at 37° C. for 24 h. FIG. 3D, Quantification of the data in FIG. 3C, normalized to the non-targeting (NT) plasmid control for each ISGst element. CFU, colony forming units; ND, not detected. FIG. 3E, DNA cleavage by TnpB2 is highly sensitive to TAM mutations, as assessed by plasmid interference assays. Data were quantified and plotted as in FIG. 3D for the indicated TAM mutations; TTTAT denotes the WT TAM. FIG. 3F, DNA cleavage by IscB is highly sensitive to TAM mutations, as assessed by plasmid interference assays. Data were quantified and plotted as in FIG. 3D for the indicated TAM mutations; TTCAT denotes the WT TAM. FIG. 3G, Schematic of E. coli-based genome targeting assay, in which RNA-guided DNA cleavage of lacZ by TnpB/IscB results in cell death. FIG. 3H, TnpB2 and IscB are active for targeted genomic DNA cleavage, as assessed by genome targeting assay. Transformants with a targeting (T) or non-targeting (NT) ωRNA were serially diluted and plated on selective media at 37° C. for 24 h. dTnpB2, D196A mutation; dIscB, D58A/H209A/H210A mutations.

[0038] FIGS. 4A-4D show unbiased identification of TnpB/IscB TAM specificity by ChIP-seq and library assays. FIG. 4A, Schematic of ChIP-seq workflow to monitor genome-wide binding specificity of TnpB/IscB. E. coli cells were transformed with plasmids encoding catalytically inactive dTnpB2 or dIscB and a genome targeting (T) or non-targeting (NT) ωRNA. After induction, cells were harvested, protein-DNA cross-links were immunoprecipitated, and NGS libraries were prepared and sequenced. FIG. 4B, (Left) Genome-wide representation of ChIP-seq data for dIscB with target site (blue triangle) shown, for T and NT samples alongside the input control. Coverage is shown as reads per kilobase per million mapped reads (RPKM), normalized to the highest peak in the T sample. (Right) Off-target binding events were analyzed by MEME ChIP, which revealed a strongly conserved consensus motif consistent with the WT TAM (TTCAT) but weak seed sequence bias; part of the ωRNA guide sequence is shown below. Consensus motifs are oriented 5′ of the IS element left end. n, number of peaks contributing to the motif; E, E-value significance. FIG. 4C, Representative ChIP-seq data for dTnpB2, plotted as in FIG. 4B. FIG. 4D, (Left) Schematic of TAM library cleavage assay, in which plasmids expressing nuclease-active TnpB/IscB and an associated ωRNA (pEffector) are designed to cleave a target sequence flanked by randomized 6-mer (pTarget). Plasmid cleavage results in plasmid elimination, loss of cell viability, and depletion of the particular TAM upon library sequencing. (Right) WebLogo representation of the 10-most depleted sequences upon deep sequencing of plasmid samples from the TAM library cleavage assay for TnpB2 and IscB Consensus motifs are oriented 5′ of the IS element left end.

[0039] FIGS. 5A-5E show RNA-guided nucleases preserve IS elements at the donor site following transposase-mediated excision. FIG. 5A, Schematic of experimental workflow to measure transposon fate in E. coli in the presence of TnpA and TnpB. A mini-Tn was inserted at a compatible TAM site in lacZ, such that cells grown on X-gal exhibit a blue colony phenotype upon permanent transposon excision, or a white colony phenotype if the transposon is retained. Cells were transformed with plasmids expressing WT or mutant TnpA and/or TnpB2, with a targeting (T) or non-targeting (NT) ωRNA. Kanamycin-resistant cells with a blue color phenotype will result upon transposon loss at the donor site (excision) and transposon gain at a new target site (integration). FIG. 5B, TnpB promotes robust transposon retention at the donor site, as assessed by blue-white colony screening. Representative plating results are shown from experiments that included the indicated components. M, TnpA (Y125A) mutant; dTnpB, D196A mutation. FIG. 5C, Quantification of the data from FIG. 5B across multiple experimental replicates. Green bars indicate the frequency of blue colonies as a measure of transposon excision/retention for the indicated experimental conditions and pink indicates the frequency of blue colonies that maintain kanamycin resistance as a measure of transposon excision and reintegration elsewhere in the genome. Bars indicate mean±standard deviation (n=3). FIG. 5D, Genotypes inferred from blue-white colony screening were assessed by PCR analysis and agarose gel electrophoresis for the indicated experimental conditions, which reports on whether the mini-Tn is unexcised (UE) or excised (E) at the donor lacZ site. The first two lanes denote marker controls (ME: Mock excised and MU: Mock Unexcised) for the two possible PCR products. FIG. 5E, Peel-and-paste/cut-and-copy model for how TnpA and TnpB/IscB coordinate their catalytic activities to maintain the presence of IS200/605-family transposons at donor sites. TnpA mediates excision and re-ligation of flanking sequences at the donor site as ssDNA becomes available during DNA replication, resulting in transposon loss from the donor site. The excised ssDNA product is concurrently ligated to form a circular ssDNA-transposome complex, which can be reintegrated downstream of a TAM motif elsewhere in the genome, albeit at much lower efficiency than excision. In the presence of TnpB/IscB, RNA-guided DNA cleavage of the donor joint initiates homologous recombination with the sister chromosome that still contains the IS element, thus rapidly restoring the transposon at the original donor site; the absence of TnpB/IscB leads to permanent transposon loss after cell division. TnpB/IscB can also cleave sister chromosomes lacking the newly integrated IS element after transposition to a new target site, facilitating further spread. The transposon is shown in dark blue; the TAM is shown in yellow, and light blue rectangles represent regions complementary to the guide portion of the ωRNA.

[0040] FIGS. 6A-6D show bioinformatic analyses of IscB and TnpB homologs. FIG. 6A, Phylogenetic tree of IscB and IsrB protein homologs; IscB contain HNH and RuvC nuclease domains, whereas IsrB lacks the HNH nuclease. Genetic neighborhood analyses demonstrate that most homologs are encoded proximal to a predicted ωRNA (inner ring), whereas the vast majority do not reside near a predicted TnpA transposase gene (outer ring). The GstIscB homolog used in this study is indicated. Bootstrap values are indicated for major nodes. FIG. 6B, Schematic of a non-autonomous IS element encoding IscB and its associated ωRNA; a structural covariation model is shown in the inset. The red rectangle and dotted black line indicate the transposon boundaries, and the guide portion of the ωRNA is shown in blue. LE and RE, transposon left end and right end. FIG. 6C, Orientation bias of the nearest upstream ORFs to the indicated protein-coding gene (iscB, tnpB or IS630), demonstrating that IS elements encoding IscB are preferentially integrated (or retained) in an orientation matching that of the upstream gene. The y-axis indicates the frequency of ORFs containing the same orientation, at a distance from the gene start codon defined by the x-axis. 242 bp represents the average length of IscB-associated ωRNAs upstream of IscB ORF. The spike at ˜0-bp for TnpB corresponds to IS elements that encode adjacent/overlapping tnpA and tnpB genes. IS630 transposase genes are included as a representative gene from unrelated transposable elements. FIG. 6D, Phylogenetic tree of TnpB homologs. Genetic neighborhood analyses demonstrate that most homologs are encoded proximal to a predicted ωRNA (inner ring), whereas the vast majority do not reside near a predicted TnpA transposase gene (outer rings). Bootstrap values are indicated for major nodes. Interestingly, TnpB homologs are associated with two unrelated transposase families, tyrosine transposases (TnpA (Y)) and serine transposases (TnpA(S)) in bacteria. GstTnpB homologs used in this study are highlighted, along with the predicted structures of their associated ωRNAs, based on covariance modeling. ISGst1 TnpB1 was not experimentally active and ωRNA did not show strong covariation in structure and was therefore omitted.

[0041] FIGS. 7A-7E show classification of IS605-family elements encoded by G. stearothermophilus strain DSM458. FIG. 7A, DNA multiple sequence alignment of transposon left ends for IS200/IS605-family elements from G. stearothermophilus. The weblogo (top) is built from 47 unique elements and one representative sequence from each family (SEQ ID NOS: 215-219 for ISGst1, ISGst3, ISGst2, ISGst5, and ISGst4, respectively) is shown below, with the TAM shown in yellow and DNA guide sequences shown in red as indicated. Nucleotides highlighted in black exhibit covarying mutations, relative to ISGst1. TAM, transposon-adjacent motif; dotted black line indicates the transposon boundary. FIG. 7B, DNA multiple sequence alignment (SEQ ID NOs: 220-224 for ISGst1, ISGst3, ISGst2, ISGst5, and ISGst4, respectively) of transposon right ends for IS200/IS605-family elements from G. stearothermophilus, shown as in FIG. 7A. TEM, transposon-encoded motif is shown in orange. FIG. 7C, Phylogenetic tree of ISGst elements based on the transposon left end. Each colored clade encodes an associated TnpB/IscB protein homolog and is flanked by the indicated TAMs sequence. FIG. 7D, Phylogenetic tree of ISGst elements based on the transposon right end, shown as in FIG. 7B but with TEM sequence in lieu of TAM. FIG. 7E, Schematic of PATEs (palindrome associated transposable elements) related to ISGst1 and ISGst5, which contain similar transposon ends but no protein-coding genes. The percent sequence identity between shaded regions (black) is shown, as are the genomic accession IDs and coordinates.

[0042] FIGS. 8A-8G show specificity and efficiency of transposon DNA excision by TnpA. FIG. 8A, Schematic of heterologous transposon excision assay in E. coli. Plasmids encode TnpA and mini-transposon (Mini-Tn) substrates, whose loss is monitored by PCR using the indicated primers. The expected sizes of PCR products generated from donor joints that are produced upon re-ligation of flanking sequences are shown, for both ISGst1 and H. pylori IS608. FIG. 8B, TnpA homologs do not cross-react with distinct IS elements, as assessed by analytical PCR. Cell lysates were tested after overnight expression of TnpA in combination with a mini-Tn substrate, from either G. stearothermophilus (G) or H. pylori (H), and PCR products were resolved by agarose gel electrophoresis. M refers to catalytically inactive mutants. Note that HpyTnpA is substantially more active for DNA excision than GstTnpA under the tested conditions. U, unexcised; E, excised. FIG. 8C, Schematic of qPCR assay to quantify excision frequencies, in which one of the two primers anneals directly to the donor joint formed upon mini-Tn excision and re-ligation. FIG. 8D, Comparison of simulated excision frequencies, generated by mixing clonally excised and unexcised lysate in known ratios, versus experimentally determined integration efficiencies measured by qPCR. FIG. 8E, qPCR-based quantification of TnpA-mediated excision of an ISGst1 mini-Tn substrate in E. coli. Mock refers to a cloned excision product; M denotes a TnpA mutant (Y125A); ND, not detected above a 0.0001% threshold. Bars indicate mean±standard deviation (n=3). FIG. 8F, Schematic of mini-Tn ISGst2 element, highlighting the subterminal palindromic transposon ends located on the top strand (top). Transposon-adjacent and transposon-encoded motifs (TAM and TEM) are shown in yellow and orange, respectively; DNA guides are shown in red, and their putative base-pairing interactions are indicated; dotted lines indicate transposon boundaries and thus the sites of ssDNA cleavage and re-ligation. LE is SEQ ID NO: 204; RE is SEQ ID NO: 205. Sanger sequencing (SEQ ID NO: 225) of excision events confirm the identity of the expected donor joint product formed upon transposon loss (bottom). Sanger sequencing results (SEQ ID NO: 227) are duplicated from FIG. 2D. FIG. 8G, Schematic and Sanger sequencing data as in FIG. 8F, but for a modified ISGst2 substrate containing TEM mutations. LE is SEQ ID NO: 204; RE is SEQ ID NO: 226. Experimentally detected products erroneously excise at an alternative TEM-like sequence located outside of the native transposon boundary (orange), presumably because of the need to maintain cognate base-pairing between the DNA guide and TEM.

[0043] FIGS. 9A-9C show mating-out assay to monitor transposition of ISGst2. FIG. 9A, Schematic of mating-out assay, in which transposition events into the F-plasmid are monitored via drug selection. E. coli donor cells carrying an F-plasmid were transformed with a plasmid encoding TnpA and ISGst2-derived mini-Tn. After induction of TnpA, conjugation was used to transfer the F-plasmid into the recipient strain, and transposition events were quantified by selecting for recipient cells (Rif^{R}) containing spectinomycin (F⁺) and kanamycin (mini-Tn⁺) resistance. FIG. 9B, Transposition frequency of ISGst2 into the F-plasmid was measured with and without tnpA. Bars indicate mean±standard deviation (n=6). FIG. 9C, Drug-selected cells from mating-out assays contain TAM-proximal IS insertions, as evidenced by long-read Nanopore sequencing. A genetic map of the F-plasmid is shown, along with the location of distinct ISGst2-derived mini-Tn integration events. The insets show a zoom-in view of each integration site at the nucleotide level, with the TAM motif highlighted in yellow and the integration site specified by an arrow. SEQ ID NOs: 228 and 229 for insertion site 1; SEQ ID NOs: 230 and 231 for insertion site 2; SEQ ID NOs: 232 and 233 for insertion site 3; SEQ ID NOs: 234 and 235 for insertion site 4.

[0044] FIGS. 10A-10E show DNA cleavage parameters with TnpB/IscB nucleases. FIG. 10A, Promoter screen to optimize conditions for E. coli-based interference assays using plasmid-encoded ωRNA and TnpB2. P1 indicates promoters for ωRNA expression, P2 indicates promoters for TnpB2 expression. Transformants with a targeting (T) or non-targeting (NT) ωRNA-pTarget combination were serially diluted and plated on selective media at 37° C. for 24 h. FIG. 10B, Results from plasmid interference assays with HpyTnpB (IS608) and DraTnpB (ISDra2) using ωRNAs that target native donor joint products, which revealed an absence of activity for HpyTnpB. Experiments were performed as in FIG. 10A. FIG. 10C, DNA cleavage by TnpB2 is highly sensitive to TAM mutations, as assessed by plasmid interference assays. Data are shown as in FIG. 10A, with the indicated TAM sequences; TTTAT denotes the WT TAM, and NT denotes a non-targeting control. FIG. 10D, DNA cleavage by IscB is highly sensitive to TAM mutations, as assessed by plasmid interference assays. Data are shown as in FIG. 10A, with the indicated TAM sequences; TTCAT denotes the WT TAM, and NT denotes a non-targeting control. FIG. 10E, TnpB2 is only active for targeted genomic DNA cleavage using select ωRNAs, as assessed by genome targeting assays. Transformants with a non-targeting (NT) or one of three lacZ-specific guides were serially diluted and plated on selective media at 37° C. for 24 h.

[0045] FIGS. 11A-11D show off-target ChIP-seq DNA binding analyses. FIG. 11A, ChIP-seq experiments reveal recruitment of dIscB to the target site (blue triangle) with a targeting ωRNA shown as two independent reps. Genome-wide representation of ChIP-seq data for dIscB reshown from FIG. 4B with addition of second replicate. Representative off-target sites for dIscB identified by MACS3 are highlighted (OT1-4) and analyzed in middle and right panels, respectively. Middle panel highlights analysis of off-target binding events by dIscB using MEME ChIP, as shown in FIG. 4B. Motifs shared by off-target peaks reveal conserved TAM sequences and little conservation of the adjacent seed sequence (left; SEQ ID NOs: 236-240 for On, OT1, OT2, OT3, and OT4, respectively). The sequence of the 5′ end of the corresponding ωRNA is shown at the bottom of each motif. Two targeting replicates are shown. n indicates the number of peaks contributing to the motif and their percentage of total peaks called by MACS3; E, E-value significance of the motif generated from the MEME ChIP analysis (right of weblogo). DNA sequences corresponding to the on-target and off-target sites are shown on right with TAM (yellow) and mismatches (red) highlighted. OT1-4 represent the top enrichment peaks contributing to each motif, as called by MACS3 with respect to the input sample (Methods). FIG. 11B, ChIP-seq experiments reveal recruitment of dTnpB2 to the target site (blue triangle) with a targeting ωRNA shown as two independent replicates. Data shown as in FIG. 11A. Similar to dIscB, dTnpB2 shows limited seed sequence requirements. SEQ ID NOs: 241-245 for On, OT1, OT2, OT3, and OT4, respectively. FIG. 11C, ChIP-seq experiments reveal recruitment of dCas9 to the target site (blue triangle) with a targeting ωRNA shown as two independent replicates. Data shown as in FIG. 11A. Analysis of off-target sites reveal a short (3-4 nt) seed sequence adjacent to the PAM motif. SEQ ID NOs: 246-250 for On, OT1, OT2, OT3, and OT4, respectively. FIG. 11D, ChIP-seq experiments reveal recruitment of dCas 12a to the target site (blue triangle) with a targeting ωRNA shown as two independent replicates. Data shown as in FIG. 11A. Analysis of off-target sites reveals a short (4-5 nt) seed sequence adjacent to PAM motif. SEQ ID NOs: 251-255 for On, OT1, OT2, OT3, and OT4, respectively.

[0046] FIGS. 12A-12C show qPCR analysis of IS element loss upon TnpA and TnpB co-expression. FIG. 12A, Schematic of qPCR-based strategy for quantifying excision. Primers are designed flanking the donor joint following excision and re-ligation. Selective PCR conditions with a shortened extension time allows for reduced amplification of the starting locus containing the mini-Tn. FIG. 12B, Comparison of simulated excision frequencies, generated by mixing clonally excised and unexcised lysate in known ratios, versus experimentally determined integration efficiencies measured by qPCR. FIG. 12C, qPCR-based quantification of transposon excision. Excised represents wild-type lacZ and unexcised represents lacZ containing mini-Tn as controls. TnpA was provided in all conditions shown in green. The detection limit is based on simulated excision frequencies shown in FIG. 12B.

[0047] FIG. 13 is a schematic of Clostridium botulinum (Cbo) IStron (CboIStron) and a covariation model of ChoTnpB ωRNA. Green rectangle indicates IStron parts derived from group I intron and shows boundaries of mobile genetic element. Covariation model of ChoTnpB ωRNA is shown in the inset. PKI indicates a possible pseudoknot formation site. Dashed line separating covariation model of ωRNA and the guide sequence indicates 3′ IStron boundary.

[0048] FIGS. 14A-14E show ChoTnpB robustly cleaves plasmid DNA in E. coli. FIG. 14A, Schematic of plasmid interference assay in E. coli. Protein-RNA complexes are encoded by pEffector, and targeted cleavage of pTarget results in a loss of kanamycin resistance and cell lethality on selective LB-agar plates. FIG. 14B, CboTnpB actively cleaves DNA when both TAM and target complementary to ωRNA are present. FIG. 14C, ChoTnpB DNA cleavage is dependent on RuvC active site. FIG. 14D, Mature ωRNA species are detected only in the presence of active ChoTnpB, the arrow indicates 5′ processing site. FIG. 14E, ωRNA maturation site shown on the covariation model, cleavage site indicated by the red arrow.

[0049] FIGS. 15A-15C show unbiased detection of ChoTnpB TAM. FIG. 15A, Schematic of plasmid interference assay in E. coli. pEffector encoded protein-RNA complexes lead to targeted cleavage of pTargets which have a compatible TAM sequence. This results in a loss of kanamycin resistance and cell lethality on selective LB-agar plates. FIG. 15B, Schematic of the plasmid library targeting. Degenerate 6 nt sequence is located at the 5′ to the guide sequence. Target SEQ ID NOs 256 and 257; Guide SEQ ID NO: 258. FIG. 15C, WebLogo representation of 50 most depleted library members. Consensus motif is located 5′ to the target sequence.

[0050] FIGS. 16A-16C show CboIStron actively self-splices in E. coli at the RNA level. FIG. 16A, A model of IStron splicing, leading to its removal from transcribed RNA and relegation of exons. FIG. 16B, Schematic of a minimal IStron construct used for splicing assays in E. coli (top row) and the selected truncations to determine predicted right end structure for splicing. FIG. 16C, RT-PCR gel showing splicing of the minimal IStron and selected right-end truncations.

[0051] FIGS. 17A-17B show CboTnpA excises the IStron at the DNA level, and the donor junction is recognized by TnpB. FIG. 17A, A model of IStron mobility mediated by TnpA, showing its excision from native location and integration in a new location. The newly formed donor junction can be recognized by TnpB and either promote recombination of the element back into its previous location or cause the loss of the plasmid due to double-stranded break. FIG. 17B, Excision assay showing that IStron is effectively excised by TnpA, but that the excision product is undetectable in the presence of TnpB.

[0052] FIG. 18 is graphs of editing outcomes with TnpB and IscB proteins. Various TnpB and IscB proteins were analyzed in human cells for their potential editing efficiencies at multiple target sites within the HEK3 locus. Each graph reports the DNA editing efficiency for the genome editing reagent shown in the title at the top of the graph; editing efficiencies were calculated as the indel frequency from high-throughput sequencing data, with the aid of CRISPResso2. Cas9 is shown as a positive control (upper left). “NT” represents a non-targeting ωRNA, while “T” represents a targeting ωRNA. “T to G” represents an ωRNA in which the 5′ sequence was extended to the nearest G base, such that the IscB ωRNA expresses a completely complementary ωRNA while still beginning with a “G” for proper U6-based RNA expression to occur.

[0053] FIGS. 19A-19E show experiments revealing the TnpA activity in stimulating recombination efficiencies. FIG. 19A, Schematic of experimental workflow to investigate transposon recombination in E. coli in the presence of TnpA and TnpB. A native ISGst2 transposon encoding either TnpB or both TnpA and TnpB was cloned adjacent to a compatible TAM site within plasmid-encoded lacZ, and this plasmid was used to transform E. coli containing an intact lacZ locus. RNA-guided DNA cleavage of genomic lacZ is expected to trigger a recombination event with the plasmid-encoded ISGst2-lacZ element, leading to genomic gain of the transposon and a white-colony phenotype. FIG. 19B, Images of representative LB-agar plates, highlighting the roles of TnpA and TnpB in transposon maintenance and spread via recombination. M, TnpA (Y125A) mutant; dTnpB, D196A mutant. FIG. 19C, Transposon-encoded TnpA and TnpB collaborate to efficiently mobilize themselves into a vacant donor site via recombination. Blue bars report the transformation efficiency for each ISGst2 plasmid, and white bars quantify colonies exhibiting a lacZ-phenotype, suggestive of a recombination (e.g., gene conversion) product. Catalytically active TnpA increases survival and recombination efficiency through an as-yet unknown mechanism. Data shown are mean±standard deviation (n=3). FIG. 19D, lacZ genotypes deduced from FIG. 30B were confirmed by PCR and agarose gel electrophoresis, revealing either parental loci or recombination products containing integrated ISGst2. FIG. 19E, The transposon-mediated recombination stimulation involves the use of a designed insert that carries homology arms (shown in blue) flanking the integration site. The cargo for insertion is surrounded by IS200/IS605 transposon ends. The process starts by transforming cells with the insert, along with the TnpA transposase enzyme. Additionally, an enzyme that generates a double-strand break (DSB), such as Cas9, is used to target a specific site that matches the homology arms. This stimulates recombination, allowing the cargo to be inserted at the desired location.

[0054] FIGS. 20A-20D show the genomic architecture and endogenous splicing activity of TnpB-encoding IStrons. FIG. 20A, IS607-family transposons mobilize through a dsDNA intermediate using a serine-family recombinase (TnpA_{S}, right), in contrast to IS200/IS605-family transposons, which mobilize through a ssDNA intermediate using a tyrosine-family recombinase (TnpA_{Y}, left). Transposons of both families are bounded by conserved left end (LE) and right end (RE) sequences, encode tnpB accessory genes, excise as circular intermediates, and generate scarless donor joints that precisely regenerate the native genomic sequence. FIG. 20B, Genetic architecture of representative IS605 and IS607-family IS elements in comparison to closely related IStrons. Both families encode TnpA and TnpB proteins, but element ends are different: IStrons have a notably longer LE where they harbor catalytic core of the intron. FIG. 20C, Phylogenetic tree of group I introns that are structurally related to the CboIStron group I intron (left), with genetic architectures of select clades schematized (right). The outer rings of the tree indicate associations with TnpA_{S} or TnpA_{Y}, as well as whether the group I intron is encoded within an rRNA locus. The green and blue colors indicate associations with TnpB nucleases or homing endonucleases (HE), which fall into many distinct enzyme families (LAGLIDADG, GIY-YIG, HNH, His-Cys Box, and Endonuclease VII). Bootstrap values are indicated for major nodes. FIG. 20D, RNA-seq and whole-genome sequencing (WGS) data from two representative IS607-family transposons in C. senegalense, that encode identifiable group I introns; annotated genes are schematized below the graphs. RNA-seq coverage corresponding to putative ωRNAs are labeled, as are the number and connectivity of spliced exon-exon junction reads (orange). Quantitative comparison of exon-intron and exon-exon reads yields an apparent splicing percentage at the RNA level (RNA-seq graphs, top left), which was compared to similar junction reads at the DNA level (WGS graphs, top left). These analyses indicate the CseIStron-1 undergoes highly efficient splicing without any evidence of transposon excision, whereas the low-level apparent CseIStron-2 splicing (2%) can be explained by low-level transposon excision within the bacterial culture, as inferred by WGS analysis.

[0055] FIG. 21 shows the evolutionary and neighborhood analyses of TnpB, TnpA, and group I introns. (left) Unrooted phylogenetic tree of bacterial TnpB homologs in which cluster representatives are highlighted (green) that contain any member associated with a group I intron. Bootstrap values are indicated for major nodes. (right) Focused phylogenetic tree of TnpB homologs, including a much larger set of additional representatives from all clusters. Neighborhood analyses were performed on the genomic contexts of each tnpB gene, revealing associations with tnpA_{S} (IS607-family), tnpA_{Y} (IS200/IS605-family), group I introns (IStron), and ωRNA loci. Large groups of IS607-(blue sector) and IS200/IS605-family (red sector) IStrons were identified, and representative CdiIStron, CboIStron, and CseIStron members are annotated. Bootstrap values are indicated for major nodes.

[0056] FIGS. 22A-22F show the genomic and functional analysis of IS200/IS605-family IStrons from C. difficile (CdiIStron). FIG. 22A, transposon left end (LE; SEQ ID NO: 259) and right end (RE, SEQ ID NO: 260) covariance models for CdiIStron; the predicted LE and RE secondary structures recognized by TnpA_{Y} during transposon excision and integration are shown in the inset (top). A homologous C. difficile genomic locus lacking the transposon insertion is shown below. FIG. 22B, DNA multiple sequence alignment of transposon left end (LE, SEQ ID NOs: 261-270) and right end (RE, SEQ ID NOs: 271-280) sequences for 10 select CdiIStrons, based on comparative genomics and covariance models, with a consensus sequence shown at the top. The transposon adjacent motif (TAM), transposon encoded motif (TEM), and DNA guide sequences for both LE and RE are highlighted in yellow (TAM and LE guide) and orange (TEM and RE guide); dotted black lines indicate the upstream and downstream transposon boundaries. FIG. 22C, Secondary structure of the group I intron from a representative CdiIStron, with scaffold, substrate, and catalytic domains colored in green, brown, and yellow, respectively. Paired stem-loops defined as P1-P9, according to conventions defined by Hasselmayer et al. (Anaerobe. 2004 April; 10 (2): 85-92); the region that harbors tnpA_{y} and/or tnpB ORFs is indicated, as are the predicted 3′ and 5′ splice sites (SS). FIG. 22D, Schematic showing the predicted exon-exon junction products upon self-splicing of two representative CdiIStrons, compared to the coding sequences from otherwise isogenic strains that lack the IStron insertion. Protein sequences SEQ ID NOs: 281-285; DNA sequences SEQ ID NOs: 287-292, top to bottom respectively. FIG. 22E, Predicted ωRNA secondary structure (SEQ ID NO: 293) for a representative CdiIStron, based on secondary structure folding and alignment to the covariance model. The region also recognized by TnpA_{Y} at the DNA level is highlighted in orange. A cryoEM structure of DraTnpB (ISDra2) bound to its ωRNA substrate (PDB ID: 8BF8) is shown at right, highlighting the stem-loop (orange) that is recognized similarly at the RNA and DNA levels by TnpB and TnpA_{Y}, respectively. FIG. 22F, Secondary structure of the transposon RE SSDNA (SEQ ID NO: 294) for the same CdiIStron from FIG. 22E, based on covariance modeling; predicted DNA-DNA base-pairing between the DNA ‘guide’ (red) and transposon-encoded motif (TEM; orange) is highlighted. An X-ray crystal structure of HpyTnpAY bound to its RE substrate (PDB ID: 2A60) is shown at right, highlighting the stem-loop (orange) that is recognized similarly at the RNA and DNA levels by TnpB and TnpA_{Y}, respectively.

[0057] FIG. 23 shows comparative sequence and RNA-seq analyses of C. difficile intron and IStron elements. RNA-seq read coverage mapping to the indicated CdiIStron loci in C. difficile strain Cd1, as well as a representative standalone group I left (top left) and non-intron-containing IS605-family element (top right). The genomic coordinates are shown, as are gene annotations below each graph. RNA-seq coverage corresponding to the folded portion of group I introns are indicated. The number and connectivity of spliced exon-exon junction reads are highlighted, and quantitative comparison of exon-intron and exon-exon reads yields an apparent splicing percentage at the RNA level (top left of each graph). These analyses reveal a wide range of CdiIStron splicing efficiencies, though numbers may also be affected by DNA transposon loss within the population.

[0058] FIGS. 24A-24F show the genomic and functional analysis of IS607-family IStrons from C. botulinum (CboIStron). FIG. 24A, Schematic of episomal prophage in C. botulinum strain 1Cb16868 (NCBI accession ID: NZ_CM003334.1), highlighting the location of the botulinum neurotoxin gene and IS605-family, IS607-family elements, and IS607-family IStron elements. FIG. 24B, Transposon left end (LE) and right end (RE) definitions for two representative CboIStron elements, based on comparative genomics. Homologous C. botulinum genomic loci lacking the transposon insertions are shown below, which support the inferred transposon and splicing boundaries; the protein encoded by both IStron-interrupted genes are indicated. Genomic coordinates and NCBI genomic accession IDs are indicated at left, as are sequence identities between the sequences being compared (shaded wedges). FIG. 24C, DNA multiple sequence alignment of transposon LE (SEQ ID NOs: 295-304) and RE (SEQ ID NOS: 305-314) sequences for 10 select CboIStrons, with a consensus sequence shown at the top. The predicted transposon adjacent motif (TAM) is highlighted in yellow; dotted black lines indicate the upstream and downstream transposon boundaries. The top row corresponds to CboIStron-1 from FIG. 24B, which is the source of the TnpA_{S}, TnpB, ωRNA, and intron constructs used in heterologous E. coli experiments. FIG. 24D, Secondary structure of the group I intron from a representative CboIStron, with scaffold, substrate, and catalytic domains colored in green, brown, and yellow, respectively. Paired stem-loops defined as P1-P9, according to conventions defined by Hasselmayer et al. (2003); the region that harbors tnpA_{S} and/or tnpB ORFs is indicated, as are the predicted 3′ and 5′ splice sites (SS). FIG. 24E, Schematic showing the predicted exon-exon junction products upon self-splicing of two representative CboIStrons from FIG. 24A, compared to the coding sequences from otherwise isogenic strains that lack the IStron insertion. Protein sequences SEQ ID NOs: 315-320; DNA sequences SEQ ID NOs: 321-326, top to bottom respectively. FIG. 24F, Comparison of ωRNAs from well-studied representative IS605- and IS607-family transposons from D. radiodurans and Xylella fastidiosa (top), as well as IS607- and IS607-family CdiIStron and CboIStrons, respectively (bottom) (SEQ ID NOs: 327-330, respectively). Distinct RNA secondary structure motifs are labeled, alongside predicted pseudoknot (PK) interactions, and the guide sequence at the ωRNAs 3′ end is shown in blue. For IStrons, the guide sequence immediately follows the predicted 3′ splice site.

[0059] FIGS. 25A-25B show the evolutionary and neighborhood analyses of transposon-associated Arc-like proteins. FIG. 25A, Phylogenetic tree of Arc-like proteins, revealing genetic associations with TnpB (IS-family transposons) and Cas12k (CRISPR-associated transposons). FIG. 25B, Genetic architecture of representative transposable elements encoding Arc-like proteins (orange arrow), including IStron, IS, and CAST elements. Relevant genes are annotated, and putative transposon boundaries are indicated with inverted green triangles.

[0060] FIGS. 26A-26G show that CboTnpA_{S} catalyzes efficient IStron excision and integration, with unique dinucleotide requirements. FIG. 26A, Schematic of transposon excision assay using a CboTnpA_{S} expression plasmid (pTnpA_{S}) and CboIStron donor plasmid harboring a mini-transposon with LE and RE boundaries (pDonor). Expected substrates and products generated upon transposon excision by PCR are indicated, as are the primer binding sites. FIG. 26B, Gel electrophoresis (left) and Sanger sequencing (right) of PCR products (SEQ ID NOs: 331-333) from FIG. 26A, demonstrating that TnpA_{S} is active in recognizing and excising the IStron. Cell lysates were tested after overnight expression of TnpA_{S} with the indicated substrates, which included an IStron mutant containing mismatched dinucleotides (LE: 5′-GG-3′, RE: 5′-TT-3′), and IStrons with RE or LE deletions. Marker denotes a positive excision control, and U and E refer to unexcised and excised products. M denotes a S67A TnpA_{S} mutant. Sanger sequencing is shown at right, with the rejoined TAM and putative ωRNA-matching target highlighted in yellow and orange, respectively. FIG. 26C, Quantitative PCR-based assay to determine the minimal left end (LE) and right end (RE) sequences necessary for efficient IStron excision. Serial truncations were tested, starting with a WT substrate containing 581 bp and 221 bp derived from the native LE and RE, respectively. FIG. 26D, Schematic of transposon integration assay using a TnpA_{S} expression plasmid (pTnpA_{S}) and IStron circularized intermediate donor plasmid harboring abutted LE and RE sequences (pDonor_{CI}). With this suicide vector that cannot propagate in a pir-strain, transposon integration events can be enriched using chloramphenicol selection and deep-sequenced using TagTn-seq. FIG. 26E, Cell viability data from experiments in FIG. 26D, plotting as colony forming units (CFU), when cells contained either mutant S67A (M) or WT TnpA_{S}. FIG. 26F, Genome-wide distribution of TagTn-seq reads from experiments in FIG. 26D using WT TnpA_{S}, mapped to the E. coli genome. Data are shown for pDonor_{CI} substrates containing either a GG (top) or GC (bottom) dinucleotide. FIG. 26G, Meta-analyses of target site preferences and integration product dinucleotides at the LE and RE junction, for the genome-wide insertion data with GG and GC dinucleotide substrates shown in FIG. 26F; the number of unique integration sites is indicated. The preferred genomic target motif is GG for both substrates, but high-throughput sequencing across the LE and RE junction for integration products clearly reveals that non-canonical dinucleotides in pDonor_{CI} template correspond to non-canonical dinucleotides at the LE junction upon recombinational integration.

[0061] FIGS. 27A-27D show molecular and sequence determinants of CboIStron DNA excision by CboTnpA_{S}. FIG. 27A, Schematic of transposon excision assay using a CboTnpA_{S} expression plasmid (pTnpA_{S}) and CboIStron donor plasmid harboring a mini-transposon with LE and RE boundaries (pDonor). Expected substrates and products generated upon transposon excision are indicated, as are the primer binding sites for quantitative excision measurements using qPCR. FIG. 27B, Gel electrophoresis (left) and Sanger sequencing (right) of PCR products (SEQ ID NOs: 334-336, respectively) from FIG. 27A, demonstrating the cellular presence of transposon circular intermediates (CircInt) in a TnpA_{S}-dependent reaction. Primers were designed to amplify across the joined LE and RE, such that only the indicated product (top) would yield a PCR amplicon 280 bp in size. Reactions were performed in biological duplicates and contained either empty vector (−), mutant S67A TnpA_{S} (M), or WT TnpA_{S} (+). The Sanger sequencing data demonstrate that amplicons contained the inverted RE-LE junction, with recombined GG core dinucleotide. FIG. 27C, Gel electrophoresis of PCR products from experiments performed as in FIG. 27A using mini-Tn substrates that contained serial truncations of either the LE (top) or right end (bottom). These experiments indicate that only 40-bp and 60-bp are necessary on the LE and RE, respectively, for WT efficiencies of excision. The length of the truncated end is shown above each lane, counting from the first bp inside the LE or RE, and the mobility of PCR products represent the unexcised (U) or excised (E) products. Note that the excised product is the same size in all cases, as expected. Control lanes on the far right lacked TnpA_{S} and thus were inactive for excision. FIG. 27D, Schematic of minimal transposon design containing 60-bp LE and RE sequences (SEQ ID NO: 337 and 338, respectively) (top), sequence of minimal ends, highlighting the identification of putative TnpA_{S} binding site (yellow highlights), and mini-Tn DNA excision assay measured by qPCR. Binding sites were mutated independently or in tandem, across either the entire motif or only the TATA portion, as indicated. In all cases, disruption of two or more motifs completely abolished detectable DNA integration.

[0062] FIGS. 28A-28F show detailed investigation of target specificity and synergistic TnpA_{S}-TnpB activity during transposon integration and recombination. FIG. 28A, TagTn-seq workflow for deep sequencing of genome-wide transposition events in E. coli using TnpA_{S} and circularized intermediate donor molecules (pDonor_{CI}). Transposon-containing molecules are selectively amplified in a nested PCR after tagmentation of high-molecular weight genomic DNA, followed by next-generation sequencing (NGS), computational filtering, and read mapping back to the E. coli reference genome (left). Meta-analysis of the genomic coordinates containing transposon insertions enables identification of conserved target-site motifs (right). FIG. 28B, Genome-wide distribution of TagTn-seq reads from experiments as in FIG. 28A using WT TnpA_{S} and pDonor_{CI} containing a core GG dinucleotide, mapped to the E. coli genome (bottom). Meta-analyses reveal a strict GG dinucleotide requirement at the site of transposon integration (top). FIG. 28C, Experiments in FIG. 28B were repeated, but using pDonor_{CI} substrates containing non-canonical core dinucleotides, as indicated. Analysis of the resulting integration sites revealed that integration site preference could only partially be reprogrammed with altered core dinucleotides; that the nucleotide sequence in the LE insertion product always matched the altered core dinucleotide on pDonor_{CI}; but that a G was preferentially installed at the +1 position in the RE insertion product, regardless of altered core dinucleotide on pDonor_{CI}. FIG. 28D, PCR and gel analysis of lacZ genotypes, demonstrating the role of TnpB in promoting transposon retention by reducing the relative frequency of excision products (E) relative to unexcised transposon substrates (U). Cells expressed either wild-type (+) or mutant (S67A) TnpA (M), in the presence of WT (+) or nuclease-dead (D189A) dTnpB (d). FIG. 28E, Workflow to measure transposon recombination in E. coli with TnpA_{S} and TnpB. Native CboIStron transposons with TnpA_{S} or either WT or nuclease-dead dTnpB were inserted in the reverse direction at a compatible TAM in plasmid-encoded lacZ, such that splicing could not generate a lacZ+ phenotype. Plasmids were used to transform E. coli cells harboring a wild-type lacZ locus. RNA-guided DNA cleavage of genomic lacZ triggers recombination with the ectopic CboIStron-lacZ, leading to white colonies. Tet, tetracycline. FIG. 28F, Bar graph shows the plasmid transformation efficiency for each condition, with white bars reporting colonies with a lacZ phenotype; E, empty vector. The data reveal that TnpA_{S} and TnpB co-operate for efficient self-mobilization into a vacant donor site via recombination, but only in the presence of nuclease-active TnpB. Data are mean±s.d. (n=3).

[0063] FIGS. 29A-29I show ChoTnpB is a potent RNA-guided nuclease that prevents CboTnpA_{S}-mediated transposon extinction. FIG. 29A, Schematic of RIP-seq workflow to uncover RNA binding partners of ChoTnpB using the pEffector shown. FIG. 29B, RIP-seq read coverage for experiments with WT TnpB and RuvC-inactivated dTnpB (D189A) mapped to pEffector (left). The pre-ωRNA processing site is indicated with a red triangle, in both the graph and the RNA schematic shown at the right. The green region labeled “tnpB” corresponds to the 3′ end of the ORF. FIG. 29C, Schematic showing the regenerated target site that is produced upon transposon excision, with abutted TAM and target site. FIG. 29D, Bacterial spot assays demonstrate that TnpB is highly active for RNA-guided DNA cleavage of the donor joint, as assessed by plasmid interference assays. TnpB was expressed with either a targeting (T) or non-targeting (NT) ωRNA from a native IStron or synthetic expression plasmid context, and transformants were serially diluted, plated on selective media, and cultured at 37° C. for 24 h. Additional controls included a mutant TAM (“-”, 5′-ACCC-3′) or RuvC-inactive (D189A) dTnpB. FIG. 29E, Schematic indicating the uncertainty over whether nucleotides within the ωRNA scaffold might influence TAM specificity through direct base-pairing, especially since TnpA_{S} could theoretically recognize either of two adjacent GG core dinucleotides defining the transposon boundary. Target SEQ ID NOs: 339 and 340; guide RNA SEQ ID NO: 341. FIG. 29F, Results from a TAM library cleavage assay using a wild-type ωRNA, revealing that ChoTnpB requires a consensus 5′-(T)GGG-3′ TAM for efficient DNA cleavage. The WebLogo was generated using the 20-most depleted sequences after deep sequencing pTarget from surviving colonies (see FIG. 11A). FIG. 29G, Violin plots of TAM enrichment from TAM library assays using variant TnpB-ωRNA expression plasmids with the indicated nucleotide in the −1 position of the ωRNA. Data are plotted as the log 2-fold enrichment relative to the input library, with specific members highlighted; dotted line represents 5-fold depletion. All ωRNA variants depleted only 5′-TGGG-3′ TAMs, indicating an absence of base-pairing at the −1 position. FIG. 29H, Schematic of assay to measure transposon fate in E. coli with TnpA_{S} and TnpB-ωRNA, and bar graph FIG. 29I showing the frequency of transposon excision/retention for each condition, quantified by blue/white colony screening. A mini-Tn was inserted at a compatible TAM in lacZ, and cells were transformed with plasmids expressing wild-type or mutant S67A TnpA (M) and/or TnpB or dTnpB. White or blue colonies indicate transposon retention or excision, respectively. Data are mean±s.d. (n=3); E, empty vector; ND, not detected.

[0064] FIGS. 30A-30D show library experiments to determine TAM specificity by ChoTnpB. FIG. 30A, Schematic of TAM library cleavage assay, in which a plasmid expressing nuclease-active ChoTnpB and an associated ωRNA from within the native CboIStron (pEffector) is designed to cleave a target sequence flanked by randomized 6-mer (pTarget). Plasmid cleavage results in plasmid elimination, loss of cell viability, and depletion of the particular TAM upon library sequencing. FIG. 30B, WT (top) and non-canonical ωRNA variants screened in the TAM library assay, to investigate if base-pairing occurs at the −1 position in the ωRNA. NTS, non-target strand; TS, target strand. ωRNA stand sequences SEQ ID NOs: 342-345, top to bottom. FIG. 30C, Sequence WebLogo of top depleted library members for the ωRNA variants shown in panel FIG. 30B; The number of library members used to construct the weblogo is shown in the top left corner. Data for the WT ωRNA are replotted from is the same as shown in FIG. 29F. FIG. 30D, TAM wheels for the same ωRNA variants shown in FIG. 30B, generated using the 5% most depleted library members. These results indicate that the −1 position of the ωRNA does not confer any specificity in the recognized TAM motif.

[0065] FIGS. 31A-31D show CseIStrons encode functional self-splicing ribozymes that regenerate transposon-free transcripts. FIG. 31A, Schematic of general IStron splicing mechanism and E. coli-based cellular splicing assay. Exogenous GTP binding by the folded group I intron leads to a transesterification reaction at the 5′ splice site (SS), followed by attack of the 3′ SS by exon 1 to yield the ligated exon-exon product and excised intron. Spliced/unspliced products are detected and/or quantified by RT-PCR and RT-qPCR, respectively, using the primer pair strategies indicated at the bottom. FIG. 31B, Agarose gel electrophoresis of RT-PCR products from splicing assays in FIG. 31A with the indicated constructs, which shows the extent of unspliced (U) and spliced(S) products (top) relative to reference amplicons for a SpecR drug marker (middle) and exon1-LE junction (bottom). RT, reverse-transcriptase; Marker denotes a positive excision control; IStron (cat. mut.) contains a P7-P9 loop deletion in the intron catalytic core; IStron (TAM mut.) contains 5′-TGTA-3′ in the TAM and thereby disrupts base-pairing required for 5′ SS recognition. FIG. 31C, Sanger sequencing of RT-PCR products from FIG. 31B, for both the unspliced exon-intron boundaries (SEQ ID NOs: 346 and 347) (top) and the spliced exon-exon product (SEQ ID NO: 348) (bottom). These sequences are identical to the nucleotide sequences of unexcised and excised DNA sequences in FIG. 26. FIG. 31D, Quantitative measurements of the spliced/unspliced ratio by RT-qPCR using the assay in FIG. 31A, for the indicated constructs that contain variable ‘cargo’ sequences. The minimal construct harbors the CboIStron sequence after removal of tnpA_{S} and tnpB ORFs and exhibits a splicing ratio of ˜0.4, whereas splicing becomes nearly undetectable with cargos comprising either the tnpB gene (encoding functional TnpB), dtnpB, or a tnpB with in-frame stop codon ((*) dtnpB), all of which are ˜1180 bp in length. Constructs with alternative cargos containing the indicated length of unrelated lacZ sequence exhibited decreased splicing efficiency with increasing size, though at levels above that observed with tnpB, suggesting a potential role for the TnpB protein in splicing control.

[0066] FIGS. 32A-32C show detection and quantification of splicing and RNA-guided DNA cleavage activity. FIG. 32A, Templates for in vitro transcription (IVT)-based group I intron splicing assays were generated by PCR, and lacked any detectable truncation products (left). The ensuing IVT reactions immediately revealed evidence of spliced exon-exon junction products, as detected by RT-qPCR (right), which matched the expected size based on a Marker control; IStron (cat. mut.) contains a P7-P9 loop deletion in the intron catalytic core. U, unspliced; S, spliced. FIG. 32B, Bacterial spot assays demonstrate that TnpB is equally active for RNA-guided DNA cleavage when the ωRNA is expressed in trans from a separate ωRNA expression plasmid. The in trans activity was equivalent whether or not the mini-Tn also encoded the full-length group I intron (gI). Transformants were serially diluted, plated on selective media, and cultured at 37° C. for 24 h. FIG. 32C, Comparison of simulated spliced/unspliced ratios, generated by mixing mock-spliced and mock-unspliced lysates in known ratios, versus experimentally determined spliced-unspliced ratios measured by RT-qPCR, using the strategy described in FIG. 31A. The results demonstrate the accuracy of our quantification method.

[0067] FIGS. 33A-33H show competition between intron splicing and TnpB-ωRNA activity establishes a balance between transposon stealth and preservation. FIG. 33A, Schematic of CboIStron ωRNA secondary structure encoded within the transposon RE, with stem-loops (SL), truncation coordinates, and pseudoknot (PK) motifs labeled. FIG. 33B, RT-qPCR analysis of splicing efficiency for IStron variants in which the RE/ωRNA region was systematically truncated relative to the full-length construct (221 bp). The large splicing change with the 180-bp construct suggests sequence and/or structural features around this position that repress splicing in the full-length design. FIG. 33C, Bacterial spot assays for the same RE/ωRNA deletion constructs in FIG. 33B, in which RNA-guided DNA cleavage leads to cell death. TnpB was expressed with either a targeting (T) or non-targeting (NT) ωRNA, and transformants were serially diluted, plated on selective media, and cultured at 37° C. for 24 h. Any deletion beyond 180 bp eliminates DNA cleavage activity. FIG. 33D, RT-qPCR analysis of splicing efficiency (left), and spot assays to monitor RNA-guided DNA cleavage activity (right), for the indicated RE/ωRNA pseudo-knot mutations, plotted as in FIGS. 33B and 33C. PK_{MUT1} and PK_{MUT2} contain mutations to either the upstream or downstream motif, whereas PK_{COMP} contains compensatory mutations in both motifs. The results indicate that ωRNA PK disruption abrogates TnpB-mediated DNA cleavage, while any mutation to the downstream PK motif abrogates intron splicing; intron splicing is strongly stimulated by mutations to the upstream PK motif. FIG. 33E, RT-qPCR analysis of splicing efficiency in the presence of a second effector plasmid harboring tnpB, dtnpB, or a codon-optimized (CO) dinpB gene. Empty refers to an empty vector control. These results reveal a repressive role of TnpB in intron splicing. FIG. 33F, RT-qPCR analysis of splicing efficiency in the absence or presence of TnpB, for the indicated RE/ωRNA variants. The repressive effect of TnpB on splicing is largely ablated when the ωRNA scaffold is missing (20-bp RE) or replaced with an unrelated sequence (Insert₁+20-bp RE). FIG. 33G, RT-qPCR analysis of splicing efficiency for the full-length (221-bp) or truncated 20-bp RE variant, without (“-”) or with three distinct sequence insertions replacing the ωRNA scaffold. These experiments demonstrate that the native ωRNA scaffold sequence alone acts as a potent repressor of splicing efficiency. FIG. 33H, Overall model for the balanced effects of intron splicing, TnpB-ωRNA, and TnpA_{S} transposition activity in the maintenance and spread of IS607-family IStron elements. Similarly to IS200/IS605-family transposons, scarless DNA excision by TnpA_{S} for IS607-family elements leads to transposon loss at the donor site and thus eventual transposon extinction, without the crucial function provided by TnpB-ωRNA in generating targeted DNA double-strand breaks and triggering homologous recombination to maintain presence of the transposon (top). Unlike canonical IS200/IS605 and IS607-family transposons, group I intron-containing IStrons mitigate their fitness costs on the host by splicing themselves out of interrupted transcripts at the RNA level, thereby restoring functional gene expression (bottom, middle). Splicing and ωRNA maturation are mutually exclusive, since splicing severs the ωRNA scaffold and guide sequences, and TnpB represses splicing through competitive binding of the 3′ SS. The competition between intron splicing and TnpB-ωRNA activity thus serves to regulate the dual objectives of maintaining transposon stealth and promoting transposon proliferation for IStron elements. A similar mechanism is hypothesized for IS200/IS605-family IStrons.

[0068] FIGS. 34A-34E show structure and sequence determinants of intron splicing and RNA-guided DNA cleavage. FIG. 34A, Agarose gel electrophoresis of RT-PCR products from splicing assays with the indicated serial deletions in the transposon left end/intron region (LE/intron, left) or transposon right end/ωRNA region (RE/ωRNA, right). Unspliced (U) and spliced(S) products are indicated, relative to reference amplicons for a SpecR drug marker (bottom). Any deletion in the 581-bp LE/intron region eliminates splicing, whereas deletions of everything but the terminal 20 bp in the RE/ωRNA region are tolerated. NTC, non-template control. FIG. 34B, Quantitative measurements of the spliced/unspliced ratio by RT-qPCR for the indicated constructs that harbor deletions in the RE/ωRNA region. The WT construct contains 221-bp of the RE, whereas a shorter 20-bp construct exhibits far greater splicing activity. Any deletion beyond 16 bp leads to a loss of splicing activity. FIG. 34C, Quantitative measurements of the spliced/unspliced ratio by RT-qPCR for the indicated constructs that harbor stem-loop (SL) deletions RE/ωRNA region, as defined in FIG. 33A. The WT constructs contains 221-bp of the RE. FIG. 34D, Bacterial spot assays for the same RE/ωRNA SL deletion constructs in FIG. 34C, in which RNA-guided DNA cleavage leads to cell death. TnpB was expressed with either a targeting (T) or non-targeting (NT) ωRNA, and transformants were serially diluted, plated on selective media, and cultured at 37° C. for 24 h. Deletion of any SL except SL4 completely abolished DNA cleavage activity. FIG. 34E, Quantitative measurements of the spliced/unspliced ratio by RT-qPCR for an intron substrate driven by the indicated variable-strength promoters, with (yellow) or without (green) TnpB co-expression. The repressive effect of TnpB is strongest at low expression levels. “-” refers to no specific promoter inserted before the intron containing gene.

### DETAILED DESCRIPTION

[0069] The disclosed systems, kits, and methods provide systems and methods for nucleic acid modification.

[0070] Insertion sequences (IS) are compact and pervasive transposable elements found in bacteria, which encode the genes for their mobilization and maintenance. IS200/IS605 elements undergo ‘peel-and paste’ transposition catalyzed by the TnpA transposase, but intriguingly, they also encode diverse, TnpB-family nucleases that are evolutionarily related to the CRISPR-associated effectors Cas9 and Cas12. Although recent studies demonstrated that TnpB-family proteins function as an RNA-guided DNA endonucleases, the broader biological role of this activity has remained enigmatic.

[0071] Section headings as used in this section and the entire disclosure herein are merely for organizational purposes and are not intended to be limiting.

### Definitions

[0072] The terms “comprise(s),” “include(s),” “having,” “has,” “can,” “contain(s),” and variants thereof, as used herein, are intended to be open-ended transitional phrases, terms, or words that do not preclude the possibility of additional acts or structures. As used herein, comprising a certain sequence or a certain SEQ ID NO usually implies that at least one copy of said sequence is present in recited peptide or polynucleotide. However, two or more copies are also contemplated. The singular forms “a,” “and” and “the” include plural references unless the context clearly dictates otherwise. The present disclosure also contemplates other embodiments “comprising,” “consisting of,” and “consisting essentially of,” the embodiments or elements presented herein, whether explicitly set forth or not.

[0073] For the recitation of numeric ranges herein, each intervening number there between with the same degree of precision is explicitly contemplated. For example, for the range of 6-9, the numbers 7 and 8 are contemplated in addition to 6 and 9, and for the range 6.0-7.0, the number 6.0, 6.1, 6.2, 6.3, 6.4, 6.5, 6.6, 6.7, 6.8, 6.9, and 7.0 are explicitly contemplated.

[0074] Unless otherwise defined herein, scientific, and technical terms used in connection with the present disclosure shall have the meanings that are commonly understood by those of ordinary skill in the art. For example, any nomenclature used in connection with, and techniques of cell and tissue culture, molecular biology, genetics and protein and nucleic acid chemistry and hybridization described herein are those that are well known and commonly used in the art. The meaning and scope of the terms should be clear; in the event, however of any latent ambiguity, definitions provided herein take precedent over any dictionary or extrinsic definition. Further, unless otherwise required by context, singular terms shall include pluralities and plural terms shall include the singular.

[0075] As used herein, “nucleic acid” or “nucleic acid sequence” refers to a polymer or oligomer of pyrimidine and/or purine bases, preferably cytosine, thymine, and uracil, and adenine and guanine, respectively (See Albert L. Lehninger, Principles of Biochemistry, at 793-800 (Worth Pub. 1982)). The present technology contemplates any deoxyribonucleotide, ribonucleotide, or peptide nucleic acid component, and any chemical variants thereof, such as methylated, hydroxymethylated, or glycosylated forms of these bases, and the like. The polymers or oligomers may be heterogenous or homogenous in composition and may be isolated from naturally occurring sources or may be artificially or synthetically produced. In addition, the nucleic acids may be DNA or RNA, or a mixture thereof, and may exist permanently or transitionally in single-stranded or double-stranded form, including homoduplex, heteroduplex, and hybrid states. In some embodiments, a nucleic acid or nucleic acid sequence comprises other kinds of nucleic acid structures such as, for instance, a DNA/RNA helix, peptide nucleic acid (PNA), morpholino nucleic acid (see, e.g., Braasch and Corey, Biochemistry, 41 (14): 4503-4510 (2002)) and U.S. Pat. No. 5,034,506), locked nucleic acid (LNA; see Wahlestedt et al., Proc. Natl. Acad. Sci. U.S.A., 97:5633-5638 (2000)), cyclohexenyl nucleic acids (see Wang, J. Am. Chem. Soc., 122:8595-8602 (2000)), and/or a ribozyme. Hence, the term “nucleic acid” or “nucleic acid sequence” may also encompass a chain comprising non-natural nucleotides, modified nucleotides, and/or non-nucleotide building blocks that can exhibit the same function as natural nucleotides (e.g., “nucleotide analogs”); further, the term “nucleic acid sequence” as used herein refers to an oligonucleotide, nucleotide or polynucleotide, and fragments or portions thereof, and to DNA or RNA of genomic or synthetic origin, which may be single or double-stranded, and represent the sense or antisense strand. The terms “nucleic acid,” “polynucleotide,” “nucleotide sequence,” and “oligonucleotide” are used interchangeably. They refer to a polymeric form of nucleotides of any length, either deoxyribonucleotides or ribonucleotides, or analogs thereof.

[0076] As used herein, the term “percent sequence identity” refers to the percentage of nucleotides or nucleotide analogs in a nucleic acid sequence, or amino acids in an amino acid sequence, that is identical with the corresponding nucleotides or amino acids in a reference sequence of the present disclosure after aligning the two sequences and introducing gaps, if necessary, to achieve the maximum percent identity. A number of mathematical algorithms for obtaining the optimal alignment and calculating identity between two or more sequences are known and incorporated into a number of available software programs. Examples of such programs include CLUSTAL-W, T-Coffee, and ALIGN (for alignment of nucleic acid and amino acid sequences), BLAST programs (e.g., BLAST 2.1, BL2SEQ, and later versions thereof) and FASTA programs (e.g., FASTA3×, FAS™, and SSEARCH) (for sequence alignment and sequence similarity searches). Sequence alignment algorithms also are disclosed in, for example, Altschul et al., J. Molecular Biol., 215 (3): 403-410 (1990), Beigert et al., Proc. Natl. Acad. Sci. USA, 106 (10): 3770-3775 (2009), Durbin et al., eds., Biological Sequence Analysis: Probabilistic Models of Proteins and Nucleic Acids, Cambridge University Press, Cambridge, UK (2009), Soding, Bioinformatics, 21 (7): 951-960 (2005), Altschul et al., Nucleic Acids Res., 25 (17): 3389-3402 (1997), and Gusfield, Algorithms on Strings, Trees and Sequences, Cambridge University Press, Cambridge UK (1997)).

[0077] The term “homology” and “homologous” refers to a degree of identity. There may be partial homology or complete homology. A partially homologous sequence is one that is less than 100% identical to another sequence.

[0078] As used herein, the term “hybridization” is used in reference to the pairing of complementary nucleic acids. Hybridization and the strength of hybridization (e.g., the strength of the association between the nucleic acids) is influenced by such factors as the degree of complementary between the nucleic acids, stringency of the conditions involved, and the Tₘ of the formed hybrid. Hybridization methods involve the annealing of one nucleic acid to another, complementary nucleic acid, e.g., a nucleic acid having a complementary nucleotide sequence. The ability of two polymers of nucleic acid containing complementary sequences to find each other and “anneal” or “hybridize” through base pairing interaction is a well-recognized phenomenon. The initial observations of the “hybridization” process by Marmur and Lane, Proc. Natl. Acad. Sci. USA, 46:453 (1960) and Doty et al., Proc. Natl. Acad. Sci. USA, 46:461 (1960), have been followed by the refinement of this process into an essential tool of modern biology. For example, hybridization and washing conditions are now well known and exemplified in Sambrook et al., supra. The conditions of temperature and ionic strength determine the “stringency” of the hybridization.

[0079] “Complementarity” refers to the ability of a nucleic acid to form hydrogen bond(s) with another nucleic acid sequence by either traditional Watson-Crick or other non-traditional types. A percent complementarity indicates the percentage of residues in a nucleic acid molecule, which can form hydrogen bonds (e.g., Watson-Crick base pairing) with a second nucleic acid sequence. Full complementarity is not necessarily required, provided there is sufficient complementarity to cause hybridization.

[0080] As used herein, a “double-stranded nucleic acid” may be a portion of a nucleic acid, a region of a longer nucleic acid, or an entire nucleic acid. A “double-stranded nucleic acid” may be, e.g., without limitation, a double-stranded DNA, a double-stranded RNA, a double-stranded DNA/RNA hybrid, etc. A single-stranded nucleic acid having secondary structure (e.g., base-paired secondary structure) and/or higher order structure (e.g., a stem-loop structure) may also be considered a “double-stranded nucleic acid.” For example, triplex structures are considered to be “double-stranded.” In some embodiments, any base-paired nucleic acid is a “double-stranded nucleic acid.”

[0081] The term “gene” refers to a DNA sequence that comprises control and coding sequences necessary for the production of an RNA having a non-coding function (e.g., a ribosomal or transfer RNA), a polypeptide, or a precursor of any of the foregoing. The RNA or polypeptide can be encoded by a full length coding sequence or by any portion of the coding sequence so long as the desired activity or function is retained. Thus, a “gene” refers to a DNA or RNA, or portion thereof, that encodes a polypeptide or an RNA chain that has functional role to play in an organism. For the purpose of this disclosure, it may be considered that genes include regions that regulate the production of the gene product, whether or not such regulatory sequences are adjacent to coding and/or transcribed sequences. Accordingly, a gene includes, but is not necessarily limited to, promoter sequences, terminators, translational regulatory sequences such as ribosome binding sites and internal ribosome entry sites, enhancers, silencers, insulators, boundary elements, replication origins, matrix attachment sites, and locus control regions.

[0082] The terms “non-naturally occurring,” “engineered,” and “synthetic” are used interchangeably and indicate the involvement of the hand of man. The terms, when referring to nucleic acid molecules or polypeptides mean that the nucleic acid molecule or the polypeptide is at least substantially free from at least one other component with which they are naturally associated in nature and as found in nature.

[0083] A “vector” or “expression vector” is a replicon, such as plasmid, phage, virus, or cosmid, to which another DNA segment, e.g., an “insert,” may be attached or incorporated so as to bring about the replication of the attached segment in a cell.

[0084] A cell has been “genetically modified,” “transformed,” or “transfected” by exogenous DNA, e.g., a recombinant expression vector, when such DNA has been introduced inside the cell. The presence of the exogenous DNA results in permanent or transient genetic change. The transforming DNA may or may not be integrated (covalently linked) into the genome of the cell. For example, the transforming DNA may be maintained on an episomal element such as a plasmid. With respect to eukaryotic cells, a stably transformed cell is one in which the transforming DNA has become integrated into a chromosome so that it is inherited by daughter cells through chromosome replication. This stability is demonstrated by the ability of the eukaryotic cell to establish cell lines or clones that comprise a population of daughter cells containing the transforming DNA. A “clone” is a population of cells derived from a single cell or common ancestor by mitosis. A “cell line” is a clone of a primary cell that is capable of stable growth in vitro for many generations.

[0085] A “subject” or “patient” may be human or non-human and may include, for example, animal strains or species used as “model systems” for research purposes, such a mouse model as described herein. Likewise, patient may include either adults or juveniles (e.g., children). Moreover, patient may mean any living organism, preferably a mammal (e.g., human or non-human) that may benefit from the administration of compositions contemplated herein. Examples of mammals include, but are not limited to, any member of the Mammalian class: humans, non-human primates such as chimpanzees, and other apes and monkey species; farm animals such as cattle, horses, sheep, goats, swine; domestic animals such as rabbits, dogs, and cats; laboratory animals including rodents, such as rats, mice and guinea pigs, and the like. Examples of non-mammals include, but are not limited to, birds, fish, and the like. In one embodiment of the methods and compositions provided herein, the mammal is a human.

[0086] The term “contacting” as used herein refers to bring or put in contact, to be in or come into contact. The term “contact” as used herein refers to a state or condition of touching or of immediate or local proximity. Contacting a composition to a target destination, such as, but not limited to, an organ, tissue, cell, or tumor, may occur by any means of administration known to the skilled artisan.

[0087] As used herein, the terms “providing,” “administering,” and “introducing,” are used interchangeably herein and refer to the placement of the systems of the disclosure into a cell, organism, or subject by a method or route which results in at least partial localization of the system to a desired site. The systems can be administered by any appropriate route which results in delivery to a desired location in the cell, organism, or subject.

[0088] Preferred methods and materials are described below, although methods and materials similar or equivalent to those described herein can be used in practice or testing of the present disclosure. All publications, patent applications, patents and other references mentioned herein are incorporated by reference in their entirety. The materials, methods, and examples disclosed herein are illustrative only and not intended to be limiting.

### Systems

[0089] Transposons encode RNA-guided DNA nucleases that are evolutionary ancestors to CRISPR-Cas9 and Cas12 enzymes, named IscB and TnpB respectively, but are roughly four times smaller and compact in size. These smaller nucleases function (e.g., in human cells) for targeted DSBs and genome editing. Because of their smaller size, IscB and TnpB nucleases offer promise for next-generation genome editing, since they are within the size range where packaging inside of small viral vectors (like AAV) becomes feasible, for example for use in base editing, prime editing, and epigenome editing. Indeed, IscB and TnpB show promise for a similar range of diverse genome engineering applications as has already been demonstrated with Cas9 and Cas12, but again, using a smaller and more compact protein-RNA system.

[0090] Provided herein are systems for modifying a target nucleic acid that include TnpA, TnpB, and/or IscB, or one or more nucleic acids encoding thereof. In some embodiments, the systems comprise: a TnpA protein, a TnpB protein, an IscB protein, or a combination thereof, and/or one or more nucleic acids encoding thereof; and optionally, at least one guide RNA, or one or more nucleic acids encoding thereof, complementary to at least a portion of a target nucleic acid.

[0091] In some embodiments, the system comprises, consists of, or consists essentially of a TnpA protein. In some embodiments, the system comprises, consists of, or consists essentially of a TnpA protein and at least one guide RNA.

[0092] In some embodiments, the system comprises, consists of, or consists essentially of a TnpB protein. In some embodiments, the system comprises, consists of, or consists essentially of a TnpB protein and at least one guide RNA.

[0093] In some embodiments, the system comprises a TnpA protein and a DNA nuclease capable of inducing site-specific single or double strand breaks, or one or more nucleic acids encoding thereof. The Cas CRISPR/Cas nuclease can be from any Type or Class of CRISPR-Cas systems (e.g., Class 1, Class 3, Types I-VI, or any of subtypes thereof). In some embodiments, the CRISPR/Cas nuclease is Cas9 or Cas12.

[0094] In some embodiments, the DNA nuclease is an RNA-guided DNA nuclease encoded by insertion sequences. In some embodiments, the DNA nuclease encoded by insertion sequences is IscB, IsrB, TnpB, or Fanzor.

[0095] In some embodiments, the DNA nuclease is a homing endonuclease. In some embodiments, the homing endonuclease is ISce-I, ICre-I, or HO.

[0096] In some embodiments, at least one of the TnpA, TnpB, and IscB proteins is derived from Geobacillus stearothermophilus, Clostridium botulinum, Clostridium senegalense or Clostridioides difficile.

[0097] The TnpA protein may be a serine-family recombinase or, alternatively, a tyrosine-family recombinase. In some embodiments, the TnpA protein comprises an amino acid sequence having at least 70% (e.g., having at least 75%, at least 80%, at least 85%, at least 90%, at least 92%, at least 95%, at least 96%, at least 97%, at least 98%, or at least 99%) identity to any of SEQ ID NO: 11, 21, 25, and 38-41. In some embodiments, the TnpA protein comprises an amino acid sequence of any of SEQ ID NO: 11, 21, 25, and 38-41.

[0098] The TnpB protein may be derived from an IS607-family or an IS200/IS605-family. In some embodiments, the TnpB protein comprises an amino acid sequence having at least 70% (e.g., having at least 75%, at least 80%, at least 85%, at least 90%, at least 92%, at least 95%, at least 96%, at least 97%, at least 98%, or at least 99%) identity to any of SEQ ID NOs: 1-4, 6-9, 17, 22-24, 30-37, and 42-50. In some embodiments, the TnpB protein comprises an amino acid sequence of any of SEQ ID NO: 1-4, 6-9, 17, 22-24, 30-37, and 42-50.

[0099] In some embodiments, the IscB protein comprises an amino acid sequence having at least 70% (e.g., having at least 75%, at least 80%, at least 85%, at least 90%, at least 92%, at least 95%, at least 96%, at least 97%, at least 98%, or at least 99%) identity to SEQ ID NO: 5 or 10. In some embodiments, the IscB protein comprises an amino acid sequence of SEQ ID NO: 5 or 10.

[0100] The TnpA protein may be a serine-family recombinase or a tyrosine-family recombinase. TnpA derived from IS607-family transposons represents a serine-family recombinase, hereby indicated by the suffix “(S)” to signify its serine catalytic active site. Contrarily, G. stearothermophilus TnpA corresponds to a tyrosine-family recombinase, referenced as TnpA (Y), emphasizing its tyrosine catalytic active site.

[0101] Any of the proteins described or referenced herein may comprise one or more amino acid substitutions as compared to the recited sequences. An amino acid “replacement” or “substitution” refers to the replacement of one amino acid at a given position or residue by another amino acid at the same position or residue within a polypeptide sequence. Amino acids are broadly grouped as “aromatic” or “aliphatic.” An aromatic amino acid includes an aromatic ring. Examples of “aromatic” amino acids include histidine (H or His), phenylalanine (F or Phe), tyrosine (Y or Tyr), and tryptophan (W or Trp). Non-aromatic amino acids are broadly grouped as “aliphatic.” Examples of “aliphatic” amino acids include glycine (G or Gly), alanine (A or Ala), valine (V or Val), leucine (L or Leu), isoleucine (I or He), methionine (M or Met), serine (S or Ser), threonine (T or Thr), cysteine (C or Cys), proline (P or Pro), glutamic acid (E or Glu), aspartic acid (A or Asp), asparagine (N or Asn), glutamine (Q or Gin), lysine (K or Lys), and arginine (R or Arg).

[0102] The amino acid replacement or substitution can be conservative, semi-conservative, or non-conservative. The phrase “conservative amino acid substitution” or “conservative mutation” refers to the replacement of one amino acid by another amino acid with a common property. A functional way to define common properties between individual amino acids is to analyze the normalized frequencies of amino acid changes between corresponding proteins of homologous organisms (Schulz and Schirmer, Principles of Protein Structure, Springer-Verlag, New York (1979)). According to such analyses, groups of amino acids may be defined where amino acids within a group exchange preferentially with each other, and therefore resemble each other most in their impact on the overall protein structure (Schulz and Schirmer, supra). Examples of conservative amino acid substitutions include substitutions of amino acids within the sub-groups described above, for example, lysine for arginine and vice versa such that a positive charge may be maintained, glutamic acid for aspartic acid and vice versa such that a negative charge may be maintained, serine for threonine such that a free-OH can be maintained, and glutamine for asparagine such that a free —NH₂ can be maintained. “Semi-conservative mutations” include amino acid substitutions of amino acids within the same groups listed above, but not within the same sub-group. For example, the substitution of aspartic acid for asparagine, or asparagine for lysine, involves amino acids within the same group, but different sub-groups. “Non-conservative mutations” involve amino acid substitutions between different groups, for example, lysine for tryptophan, or phenylalanine for serine, etc.

[0103] For example, the TnpA, TnpB, and or IscB protein may be fully or partially catalytically inactivated by one or more amino acid substitutions. For example, D196A GstTnpB2, D58A/H209A/H210A IscB, D189A Cho TnpB, and others as described herein. Fully or partially catalytically inactivated variants of the proteins as disclosed herein may still function as a nucleic acid binding protein, alone or in coordination with a guide RNA or other protein, with the targeting capabilities of the fully functioning protein.

[0104] Any of the proteins disclosed herein may further comprise one or more proteins, polypeptides (e.g., protein domain sequences), or peptides fused to the polypeptide. For example, the proteins disclosed herein may be fused to another protein or protein domain that provides for tagging or visualization (e.g., GFP). The one or more proteins, polypeptides (e.g., protein domain sequences), or peptides may be appended at an N-terminus, a C-terminus, internally, or a combination thereof. The one or more proteins, polypeptides (e.g., protein domain sequences), or peptides may be fused in any orientation in relationship to the disclosed protein.

[0105] Any of the proteins described or referenced herein may be linked to an effector polypeptide. Effector polypeptides include proteins or protein domains that have additional functionality or activity useful to target to certain DNA sequences. The effector polypeptide. may comprise a number of functionalities, including but not limited to, nuclease function, recombinase function, epigenetic modifying function, transposase function, integrase function, resolvase function, invertase function, protease function, DNA methyltransferase function, DNA demethylase function, histone acetylase function, histone deacetylase function, transcriptional repressor function, transcriptional activator function, DNA binding protein function, transcription factor recruiting protein function, nuclear-localization signal function, DNA editing function (e.g., deaminase) or any combination thereof. For example, some effector domains function in transcriptional regulation via their ability to interact with the basal transcriptional machinery and general co-activators, interact with other transcription factors to allow cooperative binding, and/or directly or indirectly recruit histone and chromatin modifying enzymes.

[0106] In some embodiments, the system described herein is used to modulate gene regulatory activity, such as transcriptional or translational activity. For example, the at least one effector polypeptide may comprise activator and/or repressor activity that can affect transcription upstream and downstream of coding regions, and can be used to activate or repress gene expression. In some embodiments, the at least one effector polypeptide may include domains from transcription factors (activators, repressors, coactivators, co-repressors), silencers, and/or chromatin associated proteins and their modifiers (e.g., methylases, demethylases, acetylases and deacetylases).

[0107] Accordingly, in some embodiments, a system as disclosed herein having a transcription activator effector polypeptide can be used to directly increase gene expression. In some embodiments, a system as disclosed herein comprising a transcriptional protein recruiting domain, or active fragment thereof, can be used to recruit transcriptional activators or repressors to a specific nucleic acid sequence to localize activators and repressors to modulate gene expression in a targeted manner.

[0108] In some embodiments, the effector polypeptide comprises transcriptional repressor function. Transcription repressors prevent, partially or completely, the transcription of genes near to their target site. Exemplary transcriptional repressors include, but are not limited to, KRAB-domain containing proteins, SID, and Sp1.

[0109] In some embodiments, the effector polypeptide comprises transcriptional activator function. Transcriptional activators can be generally defined as proteins, or domains thereof, that bind to specific sites on promoter DNA and bring about increased transcription of specific genes through interactions with other proteins. Exemplary transcriptional activators include, but are not limited to, VP64, p65, p53, c-Myb, GATA-1, EKLF, MyoD, E2F, dTCF, Tat, HSF1, RTA and SET7/9.

[0110] In some embodiments, the effector polypeptide comprises DNA methyltransferase or DNA methylase function. DNA methyltransferases (DNMT's) are a family of DNA modifying proteins composed of different isomers (e.g., DNMT1, DNMT3A, and DNMT3B). Other exemplary DNA methyltransferases include SssI methylase, AluI methylase, HaeIII methylase, HhaI methylase, and HpaII methylase. Their main mechanism of action is addition of a methyl group to the fifth carbon of a cytosine residue (5mc) located adjacent to a guanine residue.

[0111] In some embodiments, the effector polypeptide comprises DNA demethylase function. DNA demethylation can be mediated by at least three enzyme families: (i) the ten-eleven translocation (TET) family, mediating the conversion of 5mC into 5hmC; (ii) the AID/APOBEC family, acting as mediators of 5mC or 5hmC deamination; and (iii) the BER (base excision repair) glycosylase family involved in DNA repair.

[0112] Kinases, phosphatases, and other proteins that modify or regulate other polypeptides involved in gene regulation are also useful as effector polypeptides. Such modifiers are often involved in switching on or off transcription mediated by, for example, hormones. Other useful domains for regulating gene expression can also be obtained from the gene products of oncogenes (e.g., myc, jun, fos, myb, max, mad, rel, cts, bcl, myb, mos family members) and their associated factors and modifiers.

[0113] The effector polypeptide can be used to target enzymatic activity to locations containing the target nucleic acid sequence to which the gRNA is directed. For example, in some embodiments, effector polypeptides having integrase or transposase activity can be used to promote integration of exogenous nucleic acid sequence into specific nucleic acid sequence regions and/or eliminate (knock-out) specific endogenous nucleic acid sequence.

[0114] Integrases allow for the insertion of nucleic acids, for example, into a host genome (mammalian, human, mouse, rat, monkey, frog, fish, plant (including crop plants and experimental plants like Arabidopsis), laboratory or biomedical cell lines or primary cell cultures, C. elegans, fly (Drosophila), etc.). Integrases are found in a retrovirus such as HIV (human immunodeficiency virus) and lambda integrase.

[0115] In some embodiments, the effector polypeptide comprises transposase functionality. Transposases are enzymes that bind to the end of a transposon and catalyze its movement by a cut and paste mechanism or a replicative transposition mechanism. Exemplary transpoases include, but are not limited to, Tc1 transposase, Mos1 transposase, Tn5 transposase, and Mu transposase

[0116] In some embodiments, the effector polypeptide modifies epigenetic signals and thereby modifies gene regulation, for example by promoting histone acetylase and histone deacetylase activity. The term “epigenetic modifier,” as used herein, refers to a protein or catalytic domain thereof having enzymatic activity that results in the epigenetic modification of DNA, for example, chromosomal DNA. Epigenetic modifications include, but are not limited to, histone modifications including methylation and demethylation (e.g., mono-, di- and tri-methylation), histone acetylation and deacetylation, as well as histone ubiquitylation, phosphorylation, and sumoylation.

[0117] Histone acetylation and deacetylation are the processes by which the lysine residues within the N-terminal tail protruding from the histone core of the nucleosome are acetylated and deacetylated as part of gene regulation. These reactions are typically catalyzed by enzymes with histone acetyltransferase (HAT) or histone deacetylase (HDAC) activity. Histone acetyltransferases include GNAT family proteins (e.g., Gcn5, Gcn5L, p300/CREB-binding protein associated factor (PCAF), Elp3, HPA2 and HAT1) and MYST family proteins (e.g., Sas3, essential SAS-related acetyltransferase (Esa1), Sas2, Tip60, MOF, MOZ, MORF, and HBO1). Histone deacetylases fall into four classes. Class I includes HDACs 1, 2, 3, and 8. Class II is divided into two subgroups, Class IIA and Class IIB. Class IIA includes HDACs 4, 5, 7, and 9 while Class IIB includes HDACs 6 and 10. Class III contains the Sirtuins and Class IV contains only HDAC11. Classes of HDAC proteins are divided and grouped together based on the comparison to the sequence homologies of Rpd3, Hos1 and Hos2 for Class I HDACs, HDA1 and Hos3 for the Class II HDACs and the sirtuins for Class III HDACs.

[0118] The site-specific methylation and demethylation of histone residues are catalyzed by methyltransferases and demethylases, respectively. Histone methylases transfer methyl groups to amino acids (e.g., lysine and arginine) of histone proteins, ultimately effecting transcription of genes. Methylases include SET1, MLL, SMYD3, G9a, GLP, EZH2, and SETDB1. Histone demethylases catalyze the removal of methyl marks from histones, an activity associated with transcriptional regulation and DNA damage repair. Demethylases include, for example, KDM1A, KDM1B, KDM2A, KDM2B, UTX, UTY, Jumonji C (JmJC) domain-containing demethylases, and GSK-J4.

[0119] In some embodiments, the effector polypeptide comprises nuclease activity. A nuclease is an agent that induces a break in a nucleic acid sequence, e.g., a single or a double strand break in a double-stranded DNA sequence. Nucleases include those which cut at or near a preselected or specific sequence and those which are not site specific. For example, nucleases include, but are not limited to, zinc finger nucleases (ZFN), homing endonucleases, meganucleases, restriction enzymes, TAL effector nucleases, Argonaute nucleases, CRISPR nucleases, comprising, for example, Cas9, Cpf1, Csm1, CasX or CasY nucleases, micrococcal nuclease, staphylococcal nuclease, DNase I, T7 endonuclease, or catalytically active fragments thereof.

[0120] In some embodiments, the effector polypeptide comprises invertase activity. Invertase activity can be used to alter genome structure by swapping the orientation of a DNA fragment.

[0121] In some embodiments, the effector polypeptide comprises recombinase activity. A recombinase is a site-specific enzyme that mediates the recombination of DNA between recombinase recognition sequences, which results in the excision, integration, inversion, or exchange (e.g., translocation) of DNA fragments between the recombinase recognition sequences. Recombinases can be classified into two distinct families: serine recombinases (e.g., resolvases and invertases) and tyrosine recombinases (e.g., integrases). Examples of serine recombinases include, without limitation, Hin, Gin, Tn3 (also known as TnpR), β-six, CinH, ParA, γδ, Bxb1, ϕC31, TP901, TG1, ϕBT1, R4, ϕRV1, ϕFC1, MR11, A118, U153, and gp29. Examples of tyrosine recombinases include, without limitation, Cre, FLP, R, Lambda, HK101, HK022, and pSAM2. The serine and tyrosine recombinase names stem from the conserved nucleophilic amino acid residue that the recombinase uses to attack the DNA and which becomes covalently linked to the DNA during strand exchange.

[0122] In some embodiments, the effector polypeptide comprises resolvase activity. Resolvases are site-specific recombinases that function to excise (as a circle) a segment of DNA contained between two recombination sites (called res) and include, for example, Ruv C resolvase, Holiday junction resolvase Hjc, Tn3 and γδ resolvase.

[0123] In some embodiments, the effector polypeptide comprises a peptide or polypeptide sequence responsive to a ligand, such as a hormone receptor ligand binding domain, including, for example, the ligand binding domains of the estrogen receptor, the glucocorticosteroid receptor, and the like. Such effector domains can be used to act as “gene switches,” and be regulated by inducers, such as small molecule or protein ligands, specific for the ligand binding domain.

[0124] In some embodiments, the effector polypeptide comprises sequences or domains of polypeptides that mediate direct or indirect protein-protein interactions, including, for example, a leucine zipper domain, a STAT protein N terminal domain, and/or an FK506 binding protein.

[0125] In some embodiments, the effector polypeptide comprises DNA editing function (e.g., deaminase, DNA repair activity, DNA damage activity, dismutase activity, alkylation activity, depurination activity, oxidation activity, pyrimidine dimer forming activity, polymerase activity (e.g., reverse transcriptase), ligase activity, helicase activity, photolyase activity or glycosylase activity).

[0126] In some embodiments, the effector polypeptide comprises a deaminase, or functional fragment thereof. The deaminase, or functional fragment thereof may be derived from a naturally occurring deaminase or variant thereof (e.g., a protein, enzyme, or domain with an amino acid sequence having at least 70% identity to a naturally occurring deaminase). Alternatively, the deaminase may be a synthetic or engineered deaminase. In some embodiments, the deaminase, or functional fragment thereof, is an adenosine deaminase, also sometimes referred to as an adenine deaminase. In some embodiments, the adenosine deaminase is derived from a bacterium, such as, E. coli. In some embodiments, the deaminase, or functional fragment thereof, is a cytidine deaminase.

[0127] In some embodiments, the activity mediated by the effector polypeptide is a non-biological activity, such as a fluorescence activity (e.g., fluorescent proteins), luminescence activity (e.g., a luminescent protein or enzyme which results in luminescence when interacting with a substrate (e.g., luciferase)), or binding activity, such as those mediated by maltose binding protein (“MBP”), glutathione S transferase (GST), hexahistidine, c-myc, and the FLAG epitope, for facilitating detection, purification, monitoring expression, and/or monitoring cellular and subcellular localization of the polypeptide to which the effector domain is appended. In such embodiments, the systems can also be used as a diagnostic reagent, for example, to detect mutations in gene sequences, to purify restriction fragments from a solution, or to visualize DNA fragments of a gel.

[0128] The effector polypeptides described herein are illustrative and merely provide the skilled artisan with examples of effectors that can be used in combination with the systems and methods described herein.

[0129] In some embodiments, the effector polypeptide comprises a transcription activator, a transcription repressor, a base editor, an epigenetic modifier, a chromosomal locus imaging agent (e.g., fluorescent protein or protein tag), or a combination thereof.

[0130] In some embodiments, the effector polypeptide comprise fragments of proteins that have been separated from their natural DNA binding domains and engineered to be part of a fusion protein with the protein described herein. In some embodiments, the effector polypeptides are proteins which normally bind to other proteins or factors which result in their recruitment to a specific or non-specific nucleic acid.

[0131] Any of the proteins described or referenced herein may further have a nuclear localization sequence (NLS). The at least one nuclear localization sequence may be appended to the N-terminus, the C-terminus, or embedded in the protein (e.g., inserted internally within the open reading frame (ORF)). The polypeptides may comprise one or more nuclear localization sequences. The nuclear localization sequence may comprise any amino acid sequence known in the art to functionally tag or direct a protein for import into a cell's nucleus (e.g., for nuclear transport). Usually, a nuclear localization sequence comprises one or more positively charged amino acids, such as lysine and arginine.

[0132] In some embodiments, the NLS is a monopartite sequence. A monopartite NLS comprises a single cluster of positively charged or basic amino acids. In some embodiments, the monopartite NLS comprises a sequence of K-K/R-X-K/R, wherein X can be any amino acid. Exemplary monopartite NLSs include, without limitation, those from the SV40 large T-antigen (PKKKRKVEDP; SEQ ID NO: 349), c-Myc (PAAKRVKLD; SEQ ID NO: 350), and TUS-proteins (Kaczmarczyk S J et al. PLoS ONE 5 (1): c8889.2010). In select embodiments, the NLS comprises a c-Myc NLS.

[0133] In some embodiments, the NLS is a bipartite sequence. Bipartite NLSs comprise two clusters of basic amino acids, separated by a spacer of about 9-12 amino acids. Exemplary bipartite NLSs include the NLS of nucleoplasmin, KR[PAATKKAGQA]KKKK (SEQ ID NO: 351), the NLS of EGL-13, MSRRRKANPTKLSENAKKLAKEVEN (SEQ ID NO: 352), the bipartite SV40 NLS, KRTADGSEFESPKKKRKV (SEQ ID NO: 353).

[0134] Any of the proteins described or referenced herein may further have an epitope tag (e.g., 3×FLAG tag, an HA tag, a Myc tag, and the like). The epitope tags may be at the N-terminus, a C-terminus, or a combination thereof of the corresponding protein. In some embodiments, the epitope tag may be adjacent, either upstream or downstream, to a nuclear localization sequence.

[0135] The effector polypeptide, NLS, or epitope tag may be appended to the proteins described herein by a linker. The linker may have any of a variety of amino acid sequences. Suitable linkers include polypeptides of between 1 amino acids and 100 amino acids in length, between 4 amino acids and 40 amino acids in length, or between 4 amino acids and 25 amino acids in length. These linkers can be produced by using synthetic, linker-encoding oligonucleotides to couple the proteins, or can be encoded by a nucleic acid sequence encoding the protein. Peptide linkers with a degree of flexibility can be used. The linking peptides may have virtually any amino acid sequence, bearing in mind that the preferred linkers will have a sequence that results in a generally flexible peptide. Small amino acids, such as glycine and alanine, are generally used in creating a flexible peptide. A variety of different linkers are commercially available and are considered suitable for use, including but not limited to, glycine-serine polymers, glycine-alanine polymers, and alanine-serine polymers.

[0136] In some embodiments, the systems further comprise a guide RNA complementary to at least a portion of the target nucleic acid sequence, or a nucleic acid encoding the at least one gRNA. In addition to a sequence that binds to a target nucleic acid, in some embodiments, the gRNA may also comprise a scaffold sequence.

[0137] The gRNA or portion thereof that hybridizes to the target nucleic acid (a target site) may be any length. In some embodiments, the gRNA sequence that hybridizes to the target nucleic acid is 15, 16, 17, 18, 19, 20, 21, 22, 23, 24, 25, 26, 27, 28, 29, 30, 31, 32, 33, 34, 35, 36, 37, 38, 39, or 40 nucleotides in length. gRNAs or sgRNA(s) used in the present disclosure can be between about 5 and 100 nucleotides long, or longer (e.g., 5, 6, 7, 8, 9, 10, 11, 12, 13, 14, 15, 16, 17, 18, 19, 20, 21, 22, 23, 24, 25, 26, 27, 28, 29, 30, 31, 32, 33, 34, 35, 36, 37, 38, 39, 40, 41, 42, 43, 44, 45, 46, 47, 48, 49, 50, 51, 52, 53, 54, 55, 56, 57, 58, 59 60, 61, 62, 63, 63, 64, 65, 66, 67, 68, 69, 70, 71, 72, 73, 74, 75, 76, 77, 78, 79, 80, 81, 82, 83, 84, 85, 86, 87, 88, 89, 90, 91 92, 93, 94, 95, 96, 97, 98, 99, or 100 nucleotides in length, or longer). In some embodiments, the gRNA sequence is at least 50%, 55%, 60%, 65%, 70%, 75%, 80%, 85%, 90%, 95%, 96%, 97%, 98%, 99%, or at least 100% complementary to a target nucleic acid.

[0138] To facilitate gRNA design, many computational tools have been developed (See Prykhozhij et al. (PLoS ONE, 10 (3): (2015)); Zhu et al. (PLOS ONE, 9 (9) (2014)); Xiao et al. (Bioinformatics. Jan. 21 (2014)); Heigwer et al. (Nat Methods, 11 (2): 122-123 (2014)). Methods and tools for guide RNA design are discussed by Zhu (Frontiers in Biology, 10 (4) pp 289-296 (2015)), which is incorporated by reference herein. Additionally, there are many publicly available software tools that can be used to facilitate the design of sgRNA(s); including but not limited to, Genscript Interactive CRISPR gRNA Design Tool, WU-CRISPR, and Broad Institute GPP sgRNA Designer. There are also publicly available pre-designed gRNA sequences to target many genes and locations within the genomes of many species (human, mouse, rat, zebrafish, C. elegans), including but not limited to, IDT DNA Predesigned Alt-R CRISPR-Cas9 guide RNAs, Addgene Validated gRNA Target Sequences, and GenScript Genome-wide gRNA databases.

[0139] In some embodiments, the gRNA sequence does not comprise a scaffold sequence and a scaffold sequence is expressed as a separate transcript. In such embodiments, the gRNA sequence further comprises an additional sequence that is complementary to a portion of the scaffold sequence and functions to bind (hybridize) the scaffold sequence. Alternatively, the gRNA and scaffold sequence may be provided as omega RNA (ωRNA). Exemplary ωRNAs are provided in the Tables herein, for example, SEQ ID NOs: 12-16, 19-20, 26-29, and 51-57. The gRNA may be a non-naturally occurring gRNA.

[0140] The system may further comprise a target nucleic acid. The terms “target sequence,” “target nucleic acid,” and “target site” (e.g., a “target genomic DNA sequence”) are used interchangeably herein to refer to a polynucleotide (nucleic acid, gene, chromosome, genome, etc.) to which a guide sequence (e.g., a synthetic guide RNA) is designed to have complementarity, wherein hybridization between the target sequence and a guide sequence promotes the formation of a complex, e.g., of the guide RNA, target, and TnpB protein, provided sufficient conditions for binding exist. The target sequence and guide sequence need not exhibit complete complementarity, provided that there is sufficient complementarity to cause hybridization and promote formation of the complex. A target sequence may comprise any polynucleotide, such as DNA or RNA. Suitable DNA/RNA binding conditions include physiological conditions normally present in a cell. Other suitable DNA/RNA binding conditions (e.g., conditions in a cell-free system) are known in the art.

[0141] The target nucleic acid may or may not be flanked by a transposon adjacent motif (TAM). A TAM can be upstream of the target sequence. In one embodiment, the target sequence is immediately flanked on the 5′end by a TAM sequence. A TAM can be 1, 2, 3, 4, 5, 6, 7, 8, 9, 10 or more nucleotides in length. In certain embodiments, a TAM is between 2-6 nucleotides in length. In some embodiments, the TAM comprises a sequence of TT(C/T)A(A/T/C). In select embodiments, the TAM sequence is TTTAT or TTCAT. In some embodiments, the TAM sequence comprises TGG. Exemplary TAM sequences are provided in the Examples herein. There may be mismatches distal from the TAM.

[0142] The target nucleic acid may or may not be flanked by a transposon-encoded motif (TEM) sequence A TEM can be downstream of the target sequence. Exemplary TEM sequences are provided in the Examples herein. In some embodiments, the target nucleic acid may be flanked by at least one end sequence.

[0143] The system may further include a donor nucleic acid. The donor nucleic acid may be a part of a bacterial plasmid, bacteriophage, a virus, autonomously replicating extra chromosomal DNA element, linear plasmid, linear DNA, linear covalently closed DNA, mitochondrial or other organellar DNA, chromosomal DNA, and the like. In some embodiments, the donor nucleic acid comprises a cargo nucleic acid sequence.

[0144] The donor nucleic acid may be flanked by at least one end sequence. In some embodiments, the donor nucleic acid is flanked on the 5′ and the 3′ end with an end sequence, e.g., at least one of a left end sequence and a right end sequence.

[0145] The term “end sequence” refers to any nucleic acid comprising a sequence capable of designating the nucleic acid between the two ends for rearrangement. Usually, these sequences contain inverted repeats and may be about 10-150 base pairs long, however the exact sequence requirements differ for the specific elements and enzymes, as demonstrated in the Examples below. End sequences may or may not include additional sequences that promotes or augment transposition.

[0146] The end sequences on either end may be the same or different. The end sequence may be the endogenous end sequences or may include deletions, substitutions, or insertions. The endogenous end sequences may be truncated. For example, for Clostridium botulinum the minimal end sequences for a variety of functions are shown in Table 6.

[0147] The donor nucleic acid, and by extension the cargo nucleic acid, may of any suitable length, including, for example, about 50-100 bp (base pairs), about 100-1000 bp, at least or about 10 bp, at least or about 20 bp, at least or about 25 bp, at least or about 30 bp, at least or about 35 bp, at least or about 40 bp, at least or about 45 bp, at least or about 50 bp, at least or about 55 bp, at least or about 60 bp, at least or about 65 bp, at least or about 70 bp, at least or about 75 bp, at least or about 80 bp, at least or about 85 bp, at least or about 90 bp, at least or about 95 bp, at least or about 100 bp, at least or about 200 bp, at least or about 300 bp, at least or about 400 bp, at least or about 500 bp, at least or about 600 bp, at least or about 700 bp, at least or about 800 bp, at least or about 900 bp, at least or about 1 kb (kilobase pair), or greater.

[0148] The system may be a cell free system. Also disclosed is a cell comprising the system described herein. In some embodiments, the cell is a prokaryotic cell. In some embodiments, the cell is a eukaryotic cell. In some embodiments, the cell is a mammalian cell (e.g., a cell of a non-human primate or a human cell). Thus, in some embodiments, disclosed herein are systems for nucleic acid modification of a target nucleic acid sequence in a eukaryotic cell (e.g., a mammalian cell, a human cell).

### Nucleic Acids

[0149] The one or more nucleic acids encoding a TnpA protein, a TnpB protein, an IscB protein and guide RNA (e.g., ωRNA) may be any nucleic acid including DNA, RNA, or combinations thereof. In some embodiments, nucleic acids comprise one or more messenger RNAs, one or more vectors, or any combination thereof.

[0150] In some embodiments, the TnpA protein, TnpB protein and/or IscB protein and the guide RNA (e.g., ωRNA) are all encoded on the same nucleic acid. In some embodiments, each of the TnpA protein, TnpB protein, IscB protein and the guide RNA (e.g., ωRNA) are encoded on different nucleic acids. Alternatively, two or more nucleic acids encode any combination of the TnpA protein, TnpB protein and/or IscB protein and the guide RNA (e.g., ωRNA) in the system.

[0151] In certain embodiments, engineering the system for use in eukaryotic cells may involve codon-optimization. It will be appreciated that changing native codons to those most frequently used in mammals allows for maximum expression of the system proteins in mammalian cells (e.g., human cells). Such modified nucleic acid sequences are commonly described in the art as “codon-optimized,” or as utilizing “mammalian-preferred” or “human-preferred” codons. In some embodiments, the nucleic acid sequence is considered codon-optimized if at least about 60% (e.g., about 65%, about 70%, about 75%, about 80%, about 85%, about 90%, about 95%, or about 98%) of the codons encoded therein are mammalian preferred codons.

[0152] The present disclosure also provides for DNA segments encoding the proteins and nucleic acids disclosed herein, vectors containing these segments and cells containing the vectors. The vectors may be used to propagate the segment in an appropriate cell and/or to allow expression from the segment (e.g., an expression vector). The person of ordinary skill in the art would be aware of the various vectors available for propagation and expression of a nucleic acid sequence.

[0153] The present disclosure further provides engineered, non-naturally occurring vectors and vector systems, which can encode one or more or all of the components of the present system. The vector(s) can be introduced into a cell that is capable of expressing the polypeptide encoded thereby, including any suitable prokaryotic or eukaryotic cell.

[0154] The vectors of the present disclosure may be delivered to a eukaryotic cell in a subject. Modification of the eukaryotic cells via the present system can take place in a cell culture, where the method comprises isolating the eukaryotic cell from a subject prior to the modification. In some embodiments, the method further comprises returning said eukaryotic cell and/or cells derived therefrom to the subject.

[0155] Viral and non-viral based gene transfer methods can be used to introduce nucleic acids encoding components of the present system into cells, tissues, or a subject. Such methods can be used to administer nucleic acids encoding components of the present system to cells in culture, or in a host organism. Non-viral vector delivery systems include DNA plasmids, cosmids, RNA (e.g., a transcript of a vector described herein), a nucleic acid, and a nucleic acid complexed with a delivery vehicle. Viral vector delivery systems include DNA and RNA viruses, which have either episomal or integrated genomes after delivery to the cell. Viral vectors include, for example, retroviral, lentiviral, adenoviral, adeno-associated and herpes simplex viral vectors.

[0156] In certain embodiments, plasmids that are non-replicative, or plasmids that can be cured by high temperature may be used, such that any or all of the necessary components of the system may be removed from the cells under certain conditions. For example. this may allow for DNA integration by transforming bacteria of interest, but then being left with engineered strains that have no memory of the plasmids or vectors used for the integration.

[0157] Drug selection strategies may be adopted for positively selecting for cells that underwent DNA integration. A donor nucleic acid may contain one or more drug-selectable markers within the cargo. Then presuming that the original donor plasmid is removed, drug selection may be used to enrich for integrated clones. Colony screenings may be used to isolate clonal events.

[0158] A variety of viral constructs may be used to deliver the present system or components thereof (such as a TnpA protein, a TnpB protein, an IscB protein, and/or a guide RNA) to the targeted cells and/or a subject. Nonlimiting examples of such recombinant viruses include recombinant adeno-associated virus (AAV), recombinant adenoviruses, recombinant lentiviruses, recombinant retroviruses, recombinant herpes simplex viruses, recombinant poxviruses, phages, etc. The present disclosure provides vectors capable of integration in the host genome, such as retrovirus or lentivirus. See, e.g., Ausubel et al., Current Protocols in Molecular Biology, John Wiley & Sons, New York, 1989; Kay, M. A., et al., 2001 Nat. Medic. 7 (1): 33-40; and Walther W. and Stein U., 2000 Drugs, 60 (2): 249-71, incorporated herein by reference.

[0159] In one embodiment, a DNA segment encoding a TnpA protein, a TnpB protein, an IscB protein, and/or a guide RNA (e.g., ωRNA) is contained in a plasmid vector that allows expression of the protein(s) and subsequent isolation and purification produced by the recombinant vector. Accordingly, the proteins disclosed herein can be purified following expression, obtained by chemical synthesis, or obtained by recombinant methods.

[0160] To construct cells that express the present system or components thereof, expression vectors for stable or transient expression may be constructed via conventional methods as described herein and introduced into cells. For example, nucleic acids encoding the components of the present system may be cloned into a suitable expression vector, such as a plasmid or a viral vector in operable linkage to a suitable promoter. The selection of expression vectors/plasmids/viral vectors should be suitable for integration and replication in eukaryotic cells.

[0161] In certain embodiments, vectors of the present disclosure can drive the expression of one or more sequences in prokaryotic cells. Promoters that may be used include T7 RNA polymerase promoters, constitutive E. coli promoters, and promoters that could be broadly recognized by transcriptional machinery in a wide range of bacterial organisms. The system may be used with various bacterial hosts.

[0162] In certain embodiments, vectors of the present disclosure can drive the expression of one or more sequences in mammalian cells using a mammalian expression vector. Examples of mammalian expression vectors include pCDM8 (Seed, Nature (1987) 329:840, incorporated herein by reference) and pMT2PC (Kaufman, et al., EMBO J. (1987) 6:187, incorporated herein by reference). When used in mammalian cells, the expression vector's control functions are typically provided by one or more regulatory elements. For example, commonly used promoters are derived from polyoma, adenovirus 2, cytomegalovirus, simian virus 40, and others disclosed herein and known in the art. For other suitable expression systems for both prokaryotic and eukaryotic cells see, e.g., Chapters 16 and 17 of Sambrook, et al., MOLECULAR CLONING: A LABORATORY MANUAL. 2nd eds., Cold Spring Harbor Laboratory, Cold Spring Harbor Laboratory Press, Cold Spring Harbor, N.Y., 1989, incorporated herein by reference.

[0163] Vectors of the present disclosure can comprise any of a number of promoters known to the art, wherein the promoter is constitutive, regulatable or inducible, cell type specific, tissue-specific, or species specific. In addition to the sequence sufficient to direct transcription, a promoter sequence of the invention can also include sequences of other regulatory elements that are involved in modulating transcription (e.g., enhancers, Kozak sequences and introns). Many promoter/regulatory sequences useful for driving constitutive expression of a gene are available in the art and include, but are not limited to, for example, CMV (cytomegalovirus promoter), EF1a (human elongation factor 1 alpha promoter), SV40 (simian vacuolating virus 40 promoter), PGK (mammalian phosphoglycerate kinase promoter), Ubc (human ubiquitin C promoter), human beta-actin promoter, rodent beta-actin promoter, CBh (chicken beta-actin promoter), CAG (hybrid promoter contains CMV enhancer, chicken beta actin promoter, and rabbit beta-globin splice acceptor), TRE (Tetracycline response element promoter), H1 (human polymerase III RNA promoter), U6 (human U6 small nuclear promoter), and the like. Additional promoters that can be used for expression of the components of the present system, include, without limitation, cytomegalovirus (CMV) intermediate early promoter, a viral LTR such as the Rous sarcoma virus LTR, HIV-LTR, HTLV-1 LTR, Maloney murine leukemia virus (MMLV) LTR, mycoloproliferative sarcoma virus (MPSV) LTR, spleen focus-forming virus (SFFV) LTR, the simian virus 40 (SV40) early promoter, herpes simplex tk virus promoter, elongation factor 1-alpha (EF1-α) promoter with or without the EF1-α intron. Additional promoters include any constitutively active promoter. Alternatively, any regulatable promoter may be used, such that its expression can be modulated within a cell.

[0164] Moreover, inducible and tissue specific expression of a RNA, transmembrane proteins, or other proteins can be accomplished by placing the nucleic acid encoding such a molecule under the control of an inducible or tissue specific promoter/regulatory sequence. Examples of tissue specific or inducible promoter/regulatory sequences which are useful for this purpose include, but are not limited to, the rhodopsin promoter, the MMTV LTR inducible promoter, the SV40 late enhancer/promoter, synapsin 1 promoter, ET hepatocyte promoter, GS glutamine synthase promoter and many others. Various commercially available ubiquitous as well as tissue-specific promoters and tumor-specific are available, for example from InvivoGen. In addition, promoters which are well known in the art can be induced in response to inducing agents such as metals, glucocorticoids, tetracycline, hormones, and the like, are also contemplated for use with the invention. Thus, it will be appreciated that the present disclosure includes the use of any promoter/regulatory sequence known in the art that is capable of driving expression of the desired protein operably linked thereto.

[0165] The vectors of the present disclosure may direct expression of the nucleic acid in a particular cell type (e.g., tissue-specific regulatory elements are used to express the nucleic acid). Such regulatory elements include promoters that may be tissue specific or cell specific. The term “tissue specific” as it applies to a promoter refers to a promoter that is capable of directing selective expression of a nucleotide sequence of interest to a specific type of tissue (e.g., seeds) in the relative absence of expression of the same nucleotide sequence of interest in a different type of tissue. The term “cell type specific” as applied to a promoter refers to a promoter that is capable of directing selective expression of a nucleotide sequence of interest in a specific type of cell in the relative absence of expression of the same nucleotide sequence of interest in a different type of cell within the same tissue. The term “cell type specific” when applied to a promoter also means a promoter capable of promoting selective expression of a nucleotide sequence of interest in a region within a single tissue. Cell type specificity of a promoter may be assessed using methods well known in the art, e.g., immunohistochemical staining.

[0166] Additionally, the vector may contain, for example, some or all of the following: a selectable marker gene, such as the neomycin gene for selection of stable or transient transfectants in host cells; enhancer/promoter sequences from the immediate early gene of human CMV for high levels of transcription; transcription termination and RNA processing signals from SV40 for mRNA stability; 5′- and 3′-untranslated regions for mRNA stability and translation efficiency from highly-expressed genes like α-globin or β-globin; SV40 polyoma origins of replication and ColE1 for proper episomal replication; internal ribosome binding sites (IRESes), versatile multiple cloning sites; T7 and SP6 RNA promoters for in vitro transcription of sense and antisense RNA; a “suicide switch” or “suicide gene” which when triggered causes cells carrying the vector to die (e.g., HSV thymidine kinase, an inducible caspase such as iCasp9), and reporter gene for assessing expression of the chimeric receptor. Suitable vectors and methods for producing vectors containing transgenes are well known and available in the art. Selectable markers also include chloramphenicol resistance, tetracycline resistance, spectinomycin resistance, streptomycin resistance, erythromycin resistance, rifampicin resistance, bleomycin resistance, thermally adapted kanamycin resistance, gentamycin resistance, hygromycin resistance, trimethoprim resistance, dihydrofolate reductase (DHFR), GPT; the URA3, HIS4, LEU2, and TRP1 genes of S. cerevisiae.

[0167] When introduced into the cell, the vectors may be maintained as an autonomously replicating sequence or extrachromosomal element or may be integrated into host DNA.

[0168] In one embodiment, the present disclosure comprises integration of exogenous DNA into an endogenous gene. Alternatively, an exogenous DNA is not integrated into the endogenous gene. The DNA may be packaged into an extrachromosomal or episomal vector (such as AAV vector), which persists in the nucleus in an extrachromosomal state, and offers donor-template delivery and expression without integration into the host genome. Use of extrachromosomal gene vector technologies has been discussed in detail by Wade-Martins R (Methods Mol Biol. 2011; 738:1-17, incorporated herein by reference).

[0169] The present system (e.g., proteins, polynucleotides encoding these proteins, donor polynucleotides and compositions comprising the proteins and/or polynucleotides described herein) may be delivered by any suitable means. In certain embodiments, the system is delivered in vivo. In other embodiments, the system is delivered to isolated/cultured cells (e.g., autologous iPS cells) in vitro to provide modified cells useful for in vivo delivery to patients afflicted with a disease or condition.

[0170] Vectors according to the present disclosure can be transformed, transfected, or otherwise introduced into a wide variety of cells. Transfection refers to the taking up of a vector by a cell whether or not any coding sequences are in fact expressed. Numerous methods of transfection are known to the ordinarily skilled artisan, for example, lipofectamine, calcium phosphate co-precipitation, electroporation, DEAE-dextran treatment, microinjection, viral infection, and other methods known in the art. Transduction refers to entry of a virus into the cell and expression (e.g., transcription and/or translation) of sequences delivered by the viral vector genome. In the case of a recombinant vector, “transduction” generally refers to entry of the recombinant viral vector into the cell and expression of a nucleic acid of interest delivered by the vector genome.

[0171] Any of the vectors comprising a nucleic acid sequence that encodes the components of the present system is also within the scope of the present disclosure. Such a vector may be delivered into host cells by a suitable method. Methods of delivering vectors to cells are well known in the art and may include DNA or RNA electroporation, transfection reagents such as liposomes or nanoparticles to delivery DNA or RNA; delivery of DNA, RNA, or protein by mechanical deformation (see, e.g., Sharei et al. Proc. Natl. Acad. Sci. USA (2013) 110 (6): 2082-2087, incorporated herein by reference); or viral transduction. In some embodiments, the vectors are delivered to host cells by viral transduction. Nucleic acids can be delivered as part of a larger construct, such as a plasmid or viral vector, or directly, e.g., by electroporation, lipid vesicles, viral transporters, microinjection, and biolistics (high-speed particle bombardment). Similarly, the construct containing the one or more transgenes can be delivered by any method appropriate for introducing nucleic acids into a cell. In some embodiments, the construct or the nucleic acid encoding the components of the present system is a DNA molecule. In some embodiments, the nucleic acid encoding the components of the present system is a DNA vector and may be electroporated to cells. In some embodiments, the nucleic acid encoding the components of the present system is an RNA molecule, which may be electroporated to cells.

[0172] Additionally, delivery vehicles such as nanoparticle- and lipid-based mRNA or protein delivery systems can be used. Further examples of delivery vehicles include lentiviral vectors, ribonucleoprotein (RNP) complexes, lipid-based delivery system, gene gun, hydrodynamic, electroporation or nucleofection microinjection, and biolistics. Various gene delivery methods are discussed in detail by Nayerossadat et al. (Adv Biomed Res. 2012; 1:27) and Ibraheem et al. (Int J Pharm. 2014 Jan. 1; 459 (1-2): 70-83), incorporated herein by reference.

### Methods

[0173] Also disclosed herein are methods for nucleic acid modification utilizing the disclosed protein, nucleic acids encoding thereof, systems, or kits.

[0174] The methods may comprise contacting a target nucleic acid sequence with a system, a protein, a nucleic acid, and/or a composition disclosed herein. The descriptions and embodiments provided above for the system, the proteins, the gRNA (e.g., ωRNA), and the nucleic acids are applicable to the methods described herein.

[0175] The phrase “modifying a nucleic acid sequence” or “nucleic acid modification” as used herein, refers to modifying at least one physical feature of a nucleic acid sequence of interest. Nucleic acid modifications include, for example, single or double strand breaks, deletion, or insertion of one or more nucleotides, and other modifications that affect the structural integrity or nucleotide sequence of the nucleic acid sequence. In some embodiments, the modifications may include cleavage of the target nucleic acid, excision of the target nucleic acid, integration of the donor nucleic acid, or a combination thereof, as described and outlined in the examples and figures provided herein.

[0176] The methods may comprise excision of a target nucleic acid sequence. For example, a system comprising TnpA may be used to site-specifically excise a target DNA sequence. In some embodiments, the TnpA is derived from a IS607-family transposon. In some embodiments, the TnpA is a serine family recombinase. In such embodiments, in addition to the TAM/TEM sequences, the target nucleic acid may further be flanked by end sequences, as described above for the donor nucleic acid.

[0177] Alternatively, the methods may comprise insertion of a donor nucleic acid. For example, systems comprising TnpA, or a combination of TnpA and TnpB, for example, may be sued for RNA-guided DNA integration.

[0178] Further, the methods may comprise cleavage of the target nucleic acid sequence. For example, a system comprising TnpB, for example, may result in RNA-guided DNA cleavage of the target nucleic acid.

[0179] IStrons may also serve as platforms for introducing selection markers, facilitating their placement within any gene, even those categorized as essential. IStrons can splice at the RNA level, resembling the characteristics of group I introns. In some embodiments, the IStrons encode TnpB or IscB and optionally TnpA or a guide RNA (e.g., ωRNA), and may further include an exogenous cargo nucleic acid (e.g., selection marker, gene of interest, etc. These elements may be used to integrate exogenous nucleic acids in a wide variety of genomic locations in a range of species (e.g., using conventional genome editing techniques) or the methods disclosed herein. Once integrated, the IS element adopts the role of an adaptive ‘gene drive’.

[0180] Thus, further provided herein are engineered group I introns comprising an exogenous nucleic acid sequence. In some embodiments, the group I intron is self-splicing. In some embodiments, the group I intron is derived from an IS607 element. In some embodiments, the group I intron is derived from Clostridium botulinum. In some embodiments, the group I intron further comprises one or more of TnpA, TnpB, IscB, or a guide RNA (e.g., ωRNA).

[0181] Modifying a nucleic acid sequence may further comprise any or all of the functions provided by the effector polypeptide as described above. For example, any of the TnpA, TnpB, or IscB may be provided with a linked or conjugated effector polypeptide which will modify the target nucleic acid sequence accordingly. In some embodiments, the TnpA, TnpB, or IscB are provided as a fusion protein. Alternatively, TnpA, TnpB, or IscB include a binding moiety which associates with a moiety on the effector polypeptide to form a conjugate in situ.

[0182] The target nucleic acid sequence may be in a cell. In some embodiments, the contacting a target nucleic acid sequence comprises introducing the system, composition, or proteins into the cell. As described above the system, composition, or proteins may be introduced into eukaryotic or prokaryotic cells by methods known in the art. In some embodiments, the cell is a mammalian cell. In some embodiments, the cell is a human cell.

[0183] In some embodiments, the target nucleic acid is a nucleic acid endogenous to a target cell. In some embodiments, the target nucleic acid is a genomic DNA sequence. The term “genomic,” as used herein, refers to a nucleic acid sequence (e.g., a gene or locus) that is located on a chromosome in a cell.

[0184] In some embodiments, the target nucleic acid encodes a gene or gene product. The term “gene product,” as used herein, refers to any biochemical product resulting from expression of a gene. Gene products may be RNA or protein. RNA gene products include non-coding RNA, such as tRNA, rRNA, micro RNA (miRNA), and small interfering RNA (siRNA), and coding RNA, such as messenger RNA (mRNA). In some embodiments, the target nucleic acid sequence encodes a protein or polypeptide.

[0185] Polynucleotides containing the target nucleic acid sequence may include, but is not limited to, purified chromosomal DNA, total cDNA, cDNA fractionated according to tissue or expression state (e.g., after heat shock or after cytokine treatment other treatment) or expression time (after any such treatment) or developmental stage, plasmid, cosmid, BAC, YAC, phage library, etc. Polynucleotides containing the target site may include DNA from organisms such as Homo sapiens, Mus domesticus, Mus spretus, Canis domesticus, Bos, Caenorhabditis elegans, Plasmodium falciparum, Plasmodium vivax, Onchocerca volvulus, Brugia malayi, Dirofilaria immitis, Leishmania, Zea maize, Arabidopsis thaliana, Glycine max, Drosophila melanogaster, Saccharomyces cerevisiae, Schizosaccharomyces pombe, Neurospora, Escherichia coli, Salmonella typhimurium, Bacillus subtilis, Neisseria gonorrhoeae, Staphylococcus aureus, Streptococcus pneumonia, Mycobacterium tuberculosis, Aquifex, Thermus aquaticus, Pyrococcus furiosus, Thermus littoralis, Methanobacterium thermoautotrophicum, Sulfolobus caldoaceticus, and others.

[0186] The methods may comprise administering to the subject, in vivo, or by transplantation of ex vivo treated cells, an effective amount of the described system. In some embodiments, the vector(s) is delivered to the tissue of interest by, for example, an intramuscular, intravenous, transdermal, intranasal, oral, mucosal, or other delivery methods.

[0187] The proteins, composition, components of the present system or ex vivo treated cells may be administered with a pharmaceutically acceptable carrier or excipient as a pharmaceutical composition. In some embodiments, the components of the present system may be mixed, individually or in any combination, with a pharmaceutically acceptable carrier to form pharmaceutical compositions, which are also within the scope of the present disclosure.

[0188] In some embodiments, an effective amount of the components of the present system or compositions as described herein can be administered. As used herein the term “effective amount” may be used interchangeably with the term “therapeutically effective amount” and refers to that quantity that is sufficient to result in a desired activity upon administration to a subject in need thereof. Within the context of the present disclosure, the term “effective amount” refers to that quantity of the components of the system such that successful DNA modification is achieved.

[0189] When utilized as a method of treatment, the effective amount may depend on the particular condition being treated, the severity of the condition, the individual patient parameters including age, physical condition, size, gender and weight, the duration of the treatment, the nature of concurrent therapy (if any), the specific route of administration and like factors within the knowledge and expertise of the health practitioner. In some embodiments, the effective amount alleviates, relieves, ameliorates, improves, reduces the symptoms, or delays the progression of any disease or disorder in the subject. In some embodiments, the subject is a human.

[0190] In the context of the present disclosure insofar as it relates to any of the disease conditions recited herein, the terms “treat,” “treatment,” and the like mean to relieve or alleviate at least one symptom associated with such condition, or to slow or reverse the progression of such condition. Within the meaning of the present disclosure, the term “treat” also denotes to arrest, delay the onset (e.g., the period prior to clinical manifestation of a disease) and/or reduce the risk of developing or worsening a disease. For example, in connection with cancer the term “treat” may mean eliminate or reduce a patient's tumor burden, or prevent, delay, or inhibit metastasis, etc.

[0191] The phrase “pharmaceutically acceptable,” as used in connection with compositions and/or cells of the present disclosure, refers to molecular entities and other ingredients of such compositions that are physiologically tolerable and do not typically produce untoward reactions when administered to a subject (e.g., a mammal, a human). Preferably, as used herein, the term “pharmaceutically acceptable” means approved by a regulatory agency of the Federal or a state government or listed in the U.S. Pharmacopeia or other generally recognized pharmacopeia for use in mammals, and more particularly in humans. “Acceptable” means that the carrier is compatible with the active ingredient of the composition (e.g., the nucleic acids, vectors, cells, or therapeutic antibodies) and does not negatively affect the subject to which the composition(s) are administered. Any of the pharmaceutical compositions and/or cells to be used in the present methods can comprise pharmaceutically acceptable carriers, excipients, or stabilizers in the form of lyophilized formations or aqueous solutions.

[0192] Pharmaceutically acceptable carriers, including buffers, are well known in the art, and may comprise phosphate, citrate, and other organic acids; antioxidants including ascorbic acid and methionine; preservatives; low molecular weight polypeptides; proteins, such as serum albumin, gelatin, or immunoglobulins; amino acids; hydrophobic polymers; monosaccharides; disaccharides; and other carbohydrates; metal complexes; and/or non-ionic surfactants. Sec, e.g., Remington: The Science and Practice of Pharmacy 20th Ed. (2000) Lippincott Williams and Wilkins, Ed. K. E. Hoover.

[0193] The methods may be used for a variety of purposes. For example, the methods may include, but are not limited to, inactivation of a microbial gene, RNA-guided DNA integration in a plant or animal cell, methods of treating a subject suffering from a disease or disorder. The disclosed methods may modify a target DNA sequence in a cell so as to modulate expression of the target DNA sequence, e.g., expression of the target DNA sequence is increased, decreased, or completely eliminated (e.g., via deletion of a gene). The modifications of the target sequence may lead to, for example, gene correction, gene replacement, gene tagging, transgene insertion, nucleotide deletion/addition/correction, gene disruption, gene mutation, gene knock-down, etc.

[0194] In some embodiments, the methods described herein may be used to genetically modify a plant or plant cell. As used herein, genetically modified plants include a plant into which has been introduced an exogenous polynucleotide. Genetically modified plants also include a plant that has been genetically manipulated such that endogenous nucleotides have been altered to include a mutation, such as a deletion, an insertion, a transition, a transversion, or a combination thereof. For instance, an endogenous coding region could be deleted. Such mutations may result in a polypeptide having a different amino acid sequence than was encoded by the endogenous polynucleotide. Another example of a genetically modified plant is one having an altered regulatory sequence, such as a promoter, to result in increased or decreased expression of an operably linked endogenous coding region. The genetically modified plant may promote a desired phenotypic or genotypic plant trait.

[0195] Genetically modified plants can potentially have improved crop yields, enhanced nutritional value, and increased shelf life. They can also be resistant to unfavorable environmental conditions, insects, and pesticides. The present systems and methods have broad applications in gene discovery and validation, mutational and cisgenic breeding, and hybrid breeding. The present methods may facilitate the production of a new generation of genetically modified crops with various improved agronomic traits such as herbicide resistance, herbicide tolerance, drought tolerance, male sterility, insect resistance, abiotic stress tolerance, modified fatty acid metabolism, modified carbohydrate metabolism, modified seed yield, modified oil percent, modified protein percent, resistance to bacterial disease, disease (e.g. bacterial, fungal, and viral) resistance, high yield, and superior quality. The present methods may also facilitate the production of a new generation of genetically modified crops with optimized fragrance, nutritional value, shelf-life, pigmentations (e.g., lycopene content), starch content (e.g., low-gluten wheat), toxin levels, propagation and/or breeding and growth time. See, for example, CRISPR/Cas Genome Editing and Precision Plant Breeding in Agriculture (Chen et al., Annu Rev Plant Biol. 2019 Apr. 29; 70:667-69), incorporated herein by reference.

[0196] The present method may confer one or more of the following traits to the plant cell: herbicide tolerance, drought tolerance, male sterility, insect resistance, abiotic stress tolerance, modified fatty acid metabolism, modified carbohydrate metabolism, modified seed yield, modified oil percent, modified protein percent, resistance to bacterial disease, resistance to fungal disease, and resistance to viral disease.

[0197] The present disclosure provides for a modified plant cell produced by the present method, a plant comprising the plant cell, and a seed, fruit, plant part, or propagation material of the plant. Transformed or genetically modified plant cells of the present disclosure may be as populations of cells, or as a tissue, seed, whole plant, stem, fruit, leaf, root, flower, stem, tuber, grain, animal feed, a field of plants, and the like. The present disclosure provides a transgenic plant. The transgenic plant may be homozygous or heterozygous for the genetic modification. Also provided by the present disclosure are transformed or genetically modified plant cells, tissues, plants, and products that contain the transformed or genetically modified plant cells. The present disclosure further encompasses the progeny, clones, cell lines or cells of the transgenic plants.

[0198] The present system and method may be used to modify a plant stem cell. The present disclosure further provides progeny of a genetically modified cell, where the progeny can comprise the same genetic modification as the genetically modified cell from which it was derived. The present disclosure further provides a composition comprising a genetically modified cell.

[0199] In one embodiment, the transformed or genetically modified cells, and tissues and products comprise a nucleic acid integrated into the genome, and production by plant cells of a gene product due to the transformation or genetic modification.

[0200] Methods of introducing exogenous nucleic acids into plant cells are well known in the art. Such plant cells are considered “transformed.” DNA constructs can be introduced into plant cells by various methods, including, but not limited to PEG- or electroporation-mediated protoplast transformation, tissue culture or plant tissue transformation by biolistic bombardment, or the Agrobacterium-mediated transient and stable transformation. The transformation can be transient or stable transformation. Suitable methods also include viral infection (such as double stranded DNA viruses), transfection, conjugation, protoplast fusion, electroporation, particle gun technology, calcium phosphate precipitation, direct microinjection, silicon carbide whiskers technology, Agrobacterium-mediated transformation, and the like. The choice of method is generally dependent on the type of cell being transformed and the circumstances under which the transformation is taking place (i.e., in vitro, ex vivo, or in vivo). Transformation methods based upon the soil bacterium Agrobacterium tumefaciens are useful for introducing an exogenous nucleic acid molecule into a vascular plant. The wild-type form of Agrobacterium contains a Ti (tumor-inducing) plasmid that directs production of tumorigenic crown gall growth on host plants. Transfer of the tumor-inducing T-DNA region of the Ti plasmid to a plant genome requires the Ti plasmid-encoded virulence genes as well as T-DNA borders, which are a set of direct DNA repeats that delineate the region to be transferred. An Agrobacterium-based vector is a modified form of a Ti plasmid, in which the tumor inducing functions are replaced by the nucleic acid sequence of interest to be introduced into the plant host.

[0201] Agrobacterium-mediated transformation generally employs cointegrate vectors or binary vector systems, in which the components of the Ti plasmid are divided between a helper vector, which resides permanently in the Agrobacterium host and carries the virulence genes, and a shuttle vector, which contains the gene of interest bounded by T-DNA sequences. A variety of binary vectors are well known in the art and are commercially available, for example, from Clontech (Palo Alto, Calif.). Methods of coculturing Agrobacterium with cultured plant cells or wounded tissue such as leaf tissue, root explants, hypocotyledons, stem pieces or tubers, for example, also are well known in the art. Sec., e.g., Glick and Thompson, (eds.), Methods in Plant Molecular Biology and Biotechnology, Boca Raton, Fla.: CRC Press (1993), incorporated herein by reference.

[0202] Microprojectile-mediated transformation also can be used to produce a transgenic plant. This method, first described by Klein et al. (Nature 327:70-73 (1987), incorporated herein by reference), relies on microprojectiles such as gold or tungsten that are coated with the desired nucleic acid molecule by precipitation with calcium chloride, spermidine, or polyethylene glycol. The microprojectile particles are accelerated at high speed into an angiosperm tissue using a device such as the BIOLISTIC PD-1000 (Biorad; Hercules Calif.).

[0203] In one embodiment, the present methods may be adapted to use in plants. The vectors may be optimized for transient expression of the present system in plant protoplasts, or for stable integration and expression in intact plants via the Agrobacterium-mediated transformation.

[0204] In certain embodiments, the present methods use a monocot promoter to drive the expression of one or more components of the present systems (e.g., gRNA) in a monocot plant. In certain embodiments, the present methods use a dicot promoter to drive the expression of one or more components of the present systems (e.g., gRNA) in a dicot plant.

[0205] The present methods may be used with various microbial species, including human pathogens that are medically important, and bacterial pests that are key targets within the agricultural industry, as well as antibiotic resistant versions thereof. The method may be designed to target any gene or any set of genes, such as virulence or metabolic genes, for clinical and industrial applications in other embodiments. The present systems and methods may be used to inactivate microbial genes. In some embodiments, the gene is an antibiotic resistance gene.

[0206] The methods described here also provide for treating a disease or condition in a subject. The methods may comprise administering to the subject, in vivo, or by transplantation of ex vivo treated cells (e.g., disclosed T cells), a therapeutically effective amount of the present system, polypeptides, or components thereof.

[0207] In some embodiments, the methods are used to treat a pathogen or parasite on or in a subject by altering the pathogen or parasite. In some embodiments, the methods target a “disease-associated” gene. The term “disease-associated gene,” refers to any gene or polynucleotide whose gene products are expressed at an abnormal level or in an abnormal form in cells obtained from a disease-affected individual as compared with tissues or cells obtained from an individual not affected by the disease. A disease-associated gene may be expressed at an abnormally high level or at an abnormally low level, where the altered expression correlates with the occurrence and/or progression of the disease. A disease-associated gene also refers to a gene, the mutation or genetic variation of which is directly responsible or is in linkage disequilibrium with a gene(s) that is responsible for the etiology of a disease. Examples of genes responsible for such “single gene” or “monogenic” diseases include, but are not limited to, adenosine deaminase, α-1 antitrypsin, cystic fibrosis transmembrane conductance regulator (CFTR), β-hemoglobin (HBB), oculocutancous albinism II (OCA2), Huntingtin (HTT), dystrophia myotonica-protein kinase (DMPK), low-density lipoprotein receptor (LDLR), apolipoprotein B (APOB), neurofibromin 1 (NF1), polycystic kidney disease 1 (PKD1), polycystic kidney disease 2 (PKD2), coagulation factor VIII (F8), dystrophin (DMD), phosphate-regulating endopeptidase homologue, X-linked (PHEX), methyl-CpG-binding protein 2 (MECP2), and ubiquitin-specific peptidase 9Y, Y-linked (USP9Y). Other single gene or monogenic diseases are known in the art and described in, e.g., Chial, H. Rare Genetic Disorders: Learning About Genetic Disease Through Gene Mapping, SNPs, and Microarray Data, Nature Education 1 (1): 192 (2008); Online Mendelian Inheritance in Man (OMIM); and the Human Gene Mutation Database (HGMD). In another embodiment, the target genomic DNA sequence can comprise a gene, the mutation of which contributes to a particular disease in combination with mutations in other genes. Diseases caused by the contribution of multiple genes which lack simple (i.e., Mendelian) inheritance patterns are referred to in the art as a “multifactorial” or “polygenic” disease. Examples of multifactorial or polygenic diseases include, but are not limited to, asthma, diabetes, epilepsy, hypertension, bipolar disorder, and schizophrenia. Certain developmental abnormalities also can be inherited in a multifactorial or polygenic pattern and include, for example, cleft lip/palate, congenital heart defects, and neural tube defects. In another embodiment, the target DNA sequence can comprise a cancer oncogene. The present disclosure provides for gene editing methods that can ablate a disease-associated gene (e.g., a cancer oncogene), which in turn can be used for in vivo gene therapy for patients. In some embodiments, the gene editing methods include donor nucleic acids comprising therapeutic genes.

### Kits

[0208] Also within the scope of the present disclosure are kits that include the components of the present system, such as a TnpA protein, a TnpB protein, an IscB protein, and/or a guide RNA (e.g., ωRNA).

[0209] The kit may include instructions for use in any of the methods described herein. The instructions can comprise a description of administration of the present system or composition to a subject to achieve the intended effect. The instructions generally include information as to dosage, dosing schedule, and route of administration for the intended treatment. The kit may further comprise a description of selecting a subject suitable for treatment based on identifying whether the subject is in need of the treatment.

[0210] The kits provided herein are in suitable packaging. Suitable packaging includes, but is not limited to, vials, bottles, jars, flexible packaging, and the like.

[0211] The packaging may be unit doses, bulk packages (e.g., multi-dose packages) or sub-unit doses. Instructions supplied in the kits of the disclosure are typically written instructions on a label or package insert. The label or package insert indicates that the pharmaceutical compositions are used for treating, delaying the onset, and/or alleviating a disease or disorder in a subject.

[0212] Kits optionally may provide additional components such as buffers and interpretive information. Normally, the kit comprises a container and a label or package insert(s) on or associated with the container. In some embodiment, the disclosure provides articles of manufacture comprising contents of the kits described above.

[0213] The kit may further comprise a device for holding or administering the present system. The device may include an infusion device, an intravenous solution bag, a hypodermic needle, a vial, and/or a syringe.

### EXAMPLES

[0214] The following are examples of the present invention and are not to be construed as limiting.

### Materials and Methods

[0215] IscB and TnpB detection and database curation. Homologs of IscB proteins were comprehensively detected using the amino acid sequence of a K. racemifer homolog (NCBI Accession: WP_007919374.1) as the seed query in a JackHMMER part of the HMMER suite (v3.3.2). To minimize false homologs, a conservative inclusion and reporting threshold of 1e-30 was used in the iterative search against the NCBI NR database (retrieved on Jun. 11, 2021), resulting in 5,715 hits after convergence. These putative homologs were then annotated to profiles of known protein domains from the Pfam database (retrieved on Jun. 29, 2021) using hmmscan with an E-value threshold of 1e-5. Proteins that did not contain the RRXRR, RuvC, RuvC_III, or the RuvX domain were discarded. Although the HNH domain was annotated, proteins without the HNH were not removed. The variation in the presence of the HNH domain was preserved to better represent the natural diversity of IscBs. From the remaining set, proteins that were less 250 aa were removed to eliminate partial or fragmented sequences, resulting in a database of 4,674 non-redundant IscB homologs. Contigs of all putative iscB loci were retrieved from NCBI for downstream analysis using the Bio.Entrez package.

[0216] TnpB homologs were comprehensively detected similarly to IscB, use both the H. pylori (HpyTnpB) amino acid sequence (NCBI Accession: WP_078217163.1) and the G. stearothermophilus (Gs/TnpB2) amino acid sequence (NCBI Accession: WP_047817673.1) as seed queries for two independent iterative jackhammer searches against the NR database, with an inclusion and reporting threshold of 1e-30. The union of the two searches were taken, and proteins that were less than 250 aa were removed to trim partial or fragmented sequences, resulting in a database of 95,731 non-redundant TnpB homologs. Contigs of all putative tnpB loci were retrieved from NCBI for downstream analysis using the Bio.Entrez package.

[0217] Protein sequences used for the G. stearothermophilus proteins in the examples below are shown in Table 1.

[0218] Phylogenetic analyses. IscB protein sequences were clustered with at least 95% length coverage and 95% alignment coverage using CD-HIT (v4.8.1). The clustered representatives were taken and aligned using MAFFT (v7.508) with the E-INS-I method for 4 rounds. Post-alignment cleaning consisted of using trimA1 (v1.4.rev15) to remove columns containing more than 90% of gaps and manual inspection. The phylogenetic tree was created using IQ-Tree 2 (v2.1.4) with the WAG model of substitution. Branch support was evaluated with 1000 replicates of SH-aLRT, aBayes, and ultrafast bootstrap support from the IQTREE package. The tree with the highest maximum-likelihood was used as the reconstruction of the IscB phylogeny.

[0219] Putative TnpB sequences were clustered by 50% length coverage and 50% alignment coverage using CD-HIT. Similar to IscB, the clustered representatives were taken and aligned using MAFFT⁵⁵ with the E-INS-I method for 4 rounds. Post-alignment cleaning consisted of using trimA1 to remove columns containing more than 90% of gaps and manual inspection. The phylogenetic tree was created using IQ-Tree 2 with the WAG model of substitution. Branch support was evaluated with 1000 replicates of SH-aLRT, aBayes, and ultrafast bootstrap support from the IQTREE package. The tree with the highest maximum-likelihood was used as the reconstruction of the TnpB phylogeny.

[0220] ωRNA covariation analyses. Initially searches of the Rfam database indicated a potential ncRNA belonging to the HNH endonuclease-associated RNA and ORF (HEARO) RNA (RF02033). A covariance model of HEARO RNA (retrieved Jun. 24, 2021) was initially used to discover all HEAROs within the curated IscB-associated contig database using cmsearch from the Infernal package (v1.1.4). A liberal minimum bit score of 15 was used in an attempt to capture distant or degraded HEAROs, and the identification of a HEARO as a putative ωRNA was supported by its proximity, orientation, and relative location to the nearest identified IscB ORF. Remaining hits were considered ωRNAs if they were upstream of an IscB ORF and within 500 bp or overlapping with the nearest IscB ORF. After inspecting the RF02033 model, it appeared to lack additional structural elements located downstream. To address this, the boundaries of ωRNA were refined and used to generate a more accurate, comprehensive covariance model. Hits to the RF02033 model described above were retrieved, expanded 200 bp downstream, and clustered by 80% length coverage and 80% alignment coverage using CD-HIT. CMfinder (v0.4.1.9) was then used with recommended parameters to discover new motifs de novo. Additional structures were discovered and present in over 80% of the expanded sequences. This covariance model was used to expand the 3′ coordinates of previously identified ωRNAs to encompass the second stem loop using cmsearch on expanded ωRNAs. These refined ωRNA boundaries and sequences were then used to create a new ωRNA model. The refined ωRNAs were clustered by 99% length coverage and 99% alignment coverage using CD-HIT to remove duplicates. A structure-based multiple alignment was then performed using mLocARNA (v1.9.1) with the following parameters:
[0221] --max-diff-am 25--max-diff 60--min-prob 0.01--indel-50--indel-open-750--plfold-span 100--alifold-consensus-dp

[0222] The resulting alignment with structural information was used to generate a new ωRNA covariance model with the Infernal suite, refined with Expectation-Maximization from CMfinder, and verified with R-scape at an E-value threshold of 1e-5. The resulting ωRNA covariance model was used with cmsearch to discover new ωRNAs within the curated IscB-associated contig database. The resulting sequences were aligned to generate a new CM model that was used to again search the IscB-associated contig database. This process was repeated three times for the final generic IscB-associated ωRNA model.

[0223] While covariance models of TnpB-associated ωRNAs were available through Rfam (RF03065) and (RF02998), these models appeared to only include a very small subset of TnpB-associated ωRNA and contained very few hits. Based on small RNA-seq analysis that suggested a ncRNA often overlapped with the TnpB ORF and extending into the RE boundary of the IS element, sequences 150 bp downstream of the last nucleotide of the TnpB ORF were extracted to define the RE and transposon boundaries. The ˜ 150-bp sequences were clustered by 99% length coverage and 99% alignment coverage using CD-HIT to remove duplicates. The remaining sequences were then clustered again by 95% length coverage and 95% alignment coverage using CD-HIT. This was done to identify clusters of sequences that were closely related but not identical, as expected of IS elements that have recently mobilized to new locations. For the 300 largest clusters, which all had a minimum of 10 sequences, MUSCLE (v3.8.1551) with default parameters was used to align each cluster of sequences. Then, each cluster alignment was manually inspected for the boundary between high conservation and low conservation, or where there was a stark drop-off in mean pairwise identity over all sequences. This point was annotated for each cluster as the putative 3′ end of the IS elements. If there was no conservation boundary, sequences in these clusters were expanded by another 150 bp, in order to capture the transposon boundaries, and realigned. The consensus sequence of each alignment (defined by a 50% identity threshold up until the putative 3′ end) was extracted, and rare insertions that introduced gaps in the consensus were manually removed. With the 3′ boundary of the IS element, and thus the 3′ boundary of the TnpB ωRNA properly defined, a covariance model of the TnpB ωRNA could be built.

[0224] From a randomly selected member of each of the 300 clusters, a 250-bp window of sequence 5′ of the 3′ end of the ωRNA was extracted. A structurally based multiple alignment was then performed using mLocARNA and used to generate a TnpB-specific ωRNA covariance model with Infernal, refined with CMfinder, and verified with R-scape at an E-value threshold of 1e-5. This was iterated twice to generate the final generic model of TnpB-associated ωRNA. In addition, more localized ωRNA covariance models were created for each of the 4 TnpB homologs used in this study (GstTnpB1-4). Each protein was used as a seed query in a phmmer (v3.3.2) search against the NR database, with an inclusion and reporting threshold of 1e-30 to identify close relatives of each protein. The steps described above were used to define transposon boundaries and generate ωRNA models using sequences identified in the phmmer search.

[0225] TnpA detection and autonomous element identification. For both IscB- and TnpB-associated contigs, TnpA was detected using the Pfam Y1_Tnp (PF01797) for a hmmsearch from the HMMR suite (v3.3.2), with an E-value threshold of 1e-4. This search was performed independently on both the curated CDSs of each contig from NCBI and the ORFs predicted by Prodigal on default settings. The union of these searches was used as the final set of detected TnpA proteins. IS elements that encoded IscB homologs within 1,000 bp of a detected TnpA, or that encoded TnpB homologs within 10,000 bp of a detected TnpA, were defined as autonomous. Analysis which uncovered association with serine resolvases (PF00239) was performed with the same parameters mentioned above.

[0226] Orientation bias analysis. The closest NCBI-annotated/predicted CDS upstream of each transposon-encoded gene (tnpBliscB or the IS630 transposase) was retrieved and analyzed relative to the gene itself. Initially, the metadata for every NCBI-annotated CDS within contigs containing these genes (tnpBliscB or IS630) were retrieved, including coordinates and strandedness. Using this information, the closest upstream CDS was identified for each gene based on distance. Then, the annotated orientation of the closest upstream CDS was compared to the annotated orientation of the respective transposon-encoded gene (tnpBliscB or IS630), to determine whether they were matching. This analysis was performed for gene/CDS pairs at all distances between 0-1000 bp upstream (5′) of the transposon-encoded gene ORF, where 0-bp was defined as overlapping, using a custom Python script.

[0227] Transposon boundary and TAM/TEM motif determination for G. stearothermophilus IS elements (ISGst). IS200/IS605 elements found in G. stearothermophilus strain DSM 458 (NCBI Accession: NZ_CP016552.1) that encoded iscB or tnpB were identified by a protein homology-based search, as described above. Initial identification of transposon boundaries ware identified by multiple sequence alignment of each unique tnpB or iscB gene using DNA sequences flanking the TnpB/IscB ORF, and were aligned using MUSCLE (5.1) PPP algorithm in Geneious (2023.0.1). To build covariance models of the transposon ends, cmfinder was used to detect structural motifs for each end of ISGst1, ISGst2 and ISGst5 (LE and RE separately) and produce an alignment based on secondary structure. This model was then used for further searches (CMSearch), to identify structurally similar positions within the genome of G. stearothermophilus strain DSM 458. All transposon ends were initially paired with the most similar query end and then manually curated, to ensure each the LE and RE within a given pair were correctly positioned relative to each other. This analysis identified several PATE-like elements lacking any protein-coding genes, and a total of 47 IS elements were identified with similar LE and RE sequences. 50 bp upstream and downstream were extracted and aligned using MUSCLE (5.1) PPP algorithm in Geneious and trimmed using trimA1 (v1.4.rev15), to capture transposon boundaries and identify TAM and TEM motifs based on previous literature describing the location of these essential motifs. Transposon DNA guide regions were predicted based on structural similarities to the transposon ends of H. pylori IS608 and covarying mutations at those predicted locations. TAM motifs, which function as target sites for the transposon insertion event, were confirmed by blastn analysis of DNA sequences flanking predicted transposon boundaries to the NT or WGS database. Phylogenetic trees of transposon ends were built using FastTrec (2.1.11) with default parameters.

[0228] Small RNA-seq analyses. Small RNA-seq reads were retrieved from NCBI SRA database under accession SRX3260293. Reads were downloaded using the SRA toolkit (2.11.0) and mapped to genomic regions encoding G. stearothermophilus IscB and TnpB homologs used in this study, using G. stearothermophilus strain ATCC 7953 (GCA_000705495.1) from which small RNA-seq data derives. Reads were mapped using Geneious RNA assembler at medium sensitivity and visualized using Integrative Genomics Viewer.

[0229] Plasmid construction. All plasmids used in this study are described in Tables 7 and 8. In brief, genes encoding TnpA, TnpB, and IscB homologs from G. stearothermophilus, H. pylori and D. radiodurans were synthesized by GenScript, along mini-Tn elements containing a chloramphenicol resistance gene. To generate mini-Tn plasmids, gene fragments (GenScript) encoding the transposase (TnpA) downstream of a lac and T7 promoter, and transposon ends flanking a chloramphenicol resistance gene, were cloned into EcoRI sites of pUC57. To generate pEffector plasmids, gene fragments (Genscript) of ωRNA encoded downstream of T7 promoter, along with tnpB or iscB also encoded downstream of T7 promoter, were cloned into pCDF-Duet1 vectors at PfoI and Bsu36I sites. Oligonucleotides containing J23-series promoters were cloned into SalI and KpnI sites, replacing the T7 promoter for ωRNA expression, or into PfoI-XhoI sites, replacing the T7 promoter for tnpB expression. pTarget plasmids were generated using a minimal pCOLADuet-1, generated by around-the-horn PCR to create a minimal pCOLA-Duet-1 containing only the ColA origin of replication and kanamycin resistance gene. This vector was then used to generate pTargets encoding 45-bp target sites by around-the-horn PCR. Derivatives of these plasmids were cloned using a combination of methods, including Gibson assembly, restriction digestion-ligation, ligation of hybridized oligonucleotides, and around-the-horn PCR. Plasmids were cloned, propagated in NEB Turbo cells (NEB), purified using Miniprep Kits (Qiagen), and verified by Sanger sequencing (GENEWIZ).

[0230] Recombineering. Lambda Red (2-Red) recombination was used to generate genomically integrated mini-Tn cassette. In brief, E. coli strain MG1655 (sSL0810) was transformed with pSIM6 (pSL2684) carrying a temperature-sensitive vector encoding λ-Red recombination genes, generating strain sSL2681, and cells were made electrocompetent using standard methods. Fragments for recombineering were generated using standard PCR amplification with primers to generate 50-bp overhangs homologous to the sites of integration. PCR fragments were gel extracted and used to electroporate sSL2681, and cells were recovered for 24 h in LB media. Cells were spun down and plated onto LB-agar containing kanamycin (50 μg ml⁻¹) to select for mini-Tn cassette integration. Single colonies were isolated and confirmed to contain a genomically integrated mini-Tn within the lacZ locus by colony PCR and Sanger sequencing.

[0231] Transposon excision assays. For each excision experiment involving a plasmid-based IS element, a single plasmid encoding for TnpA and a chloramphenicol resistance gene-containing mini-Tn IS element was used to transform E. coli strain MG1655. Cultures were grown overnight at 37° C. on LB-agar under antibiotic selection (100 μg ml⁻¹ carbenicillin, 25 μg ml⁻¹ chloramphenicol). Next, three colonies were picked from each agar plate and used to inoculate 5 ml LB supplemented with 0.05 mM IPTG and antibiotic for only for backbone marker (100 μg ml⁻¹ carbenicillin). The liquid cultures were incubated at 37° C. for 24 h. Cell lysates were generated, as described previously (Klompe, S. E., et al., Nature 571, 219-225, doi: 10.1038/s41586-019-1323-z (2019)). In brief, the optical density at 600 nm was measured for liquid cultures. Approximately 3.2×10⁸ cells (equivalent to 200 μl of OD₆₀₀=2.0) were transferred to a 96-well plate. Cells were pelleted by centrifugation at 4,000 g for 5 min and resuspended in 80 μl of H₂O. Next, cells were lysed by incubating at 95° C. for 10 min in a thermal cycler. The cell debris was pelleted by centrifugation at 4,000 g for 5 min, and 10 μl of lysate supernatant was removed and serially diluted with 90 μl of H₂O to generate 10- and 100-fold lysate dilutions for PCR and qPCR analysis.

[0232] IS element excision from the plasmid backbone was detected by PCR using OneTaq 2× Master Mix with Standard Buffer (NEB) and 0.2 μM primers, designed to anneal upstream and downstream of the IS element. PCR reactions contained 0.5 μl of each primer at 10 μM, 12.5 μl of OneTaq 2× MasterMix with Standard Buffer, 2 μl of 100-fold diluted cell lysate serving as template, and 9.5 μl of H₂O. The total volume per PCR was 25 μl. Measurements were performed in a BioRad T100 thermal cycler using the following thermal cycling parameters: DNA denaturation (94° C. for 30 s), 35 cycles of amplification (annealing: 52° C. for 20 s, extension: 68° C. for 30 s), followed by a final extension (68° C. for 5 min). Products were resolved by 1.5% agarose gel electrophoresis and visualized by staining with SYBR Safe (Thermo Fisher Scientific). IS element excision events were confirmed by Sanger sequencing of gel-extracted, column-purified (Qiagen) PCR amplicons (GENEWIZ/Azenta Life Sciences).

[0233] For excision events involving genomically integrated IS elements, lysate was prepared as described above but harvested from LB-agar containing carbenicillin (100 μg ml⁻¹), spectinomycin (100 μg ml⁻¹), and X-gal (200 mg ml 1) in transposition assays combining TnpA and TnpB, as described below. Measurements were performed in a BioRad T100 thermal cycler using the following thermal cycling parameters: DNA denaturation (94° C. for 30 s), 26 cycles of amplification (annealing: 52° C. for 20 s, extension: 68° C. for 1:15 min), followed by a final extension (68° C. for 5 min). Products were resolved by 1.5% agarose gel electrophoresis and visualized by staining with SYBR Safe (Thermo Fisher Scientific). IS element excision events were confirmed by Sanger sequencing of gel-extracted, column-purified (Qiagen) PCR amplicons (GENEWIZ/Azenta Life Sciences).

[0234] qPCR quantification of IS element excision. IS element excision frequency from a plasmid backbone was detected by qPCR using SsoAdvanced™ Universal SYBR Green Supermix. qPCR analysis (FIGS. 8C-8E) was performed using a donor joint-specific primer along with a flanking primer designed to amplify only the excision product; genome-specific primers for relative quantification were designed to amplify the E. coli reference gene, rssA. 10 μl qPCR reactions containing 5 μl of SsoAdvanced™ Universal SYBR Green Supermix, 2 μl of 2.5 μM primer pair, 1 μl H₂O, and 2 μl of tenfold-diluted lysate were prepared as described for transposon excision assays. Reactions were prepared in 384-well clear/white PCR plates (BioRad), and measurements were performed on a CFX384 RealTime PCR Detection System (BioRad) using the following thermal cycling parameters to selectively amplify excision products: polymerase activation and DNA denaturation (98° C. for 2.5 min), 40 cycles of amplification (98° C. for 10 s, 62° C. for 20 s), and terminal melt-curve analysis (65-95° C. in 0.5° C. per 5 s increments).

[0235] To confirm the sensitivity of qPCR-based measurements from plasmid encoded mini-Tn substrates, lysates were prepared from cells harboring a plasmid containing a mock excised mini-Tn substrate (pSL4826) and a plasmid containing the mini-Tn but lacking an active TnpA transposase required for excision (pSL4735). Variable IS element excision frequencies were simulated across five orders of magnitude (ranging from 0.002% to 100%) by mixing cell lysates the control strain and the IS-encoding strain in various ratios, which demonstrated accurate detection of excision products in genomic IS element excision assays in vivo to a frequency of 0.001 (FIG. 8D).

[0236] Similarly, IS element excision frequencies of genomically integrated mini-TN were quantified by qPCR using SsoAdvanced™ Universal SYBR Green Supermix (BioRad) (FIG. 12). Cells were harvested from LB containing carbenicillin (100 μg ml⁻¹), spectinomycin (100 μg ml⁻¹), and X-gal (200 mg ml⁻¹), as described above. qPCR analysis was performed using transposon flanking- and genome-specific primers. Transposon flanking primers were designed to amplify an approximately 209-bp fragment upon excision. An unexcised product would yield 1,661 bp unexcised fragment. A separate pair of genome-specific primers was designed to amplify an E. coli reference gene (rssA) for normalization purposes. 10 μl qPCR reactions containing 5 μl of SsoAdvanced™ Universal SYBR Green Supermix, 2 μl of 2.5 μM primer pair, 1 μl H₂O, and 2 μl of tenfold-diluted lysate were prepared, as described for transposon excision assays. Reactions were prepared in 384-well clear/white PCR plates (BioRad), and measurements were performed on a CFX384 RealTime PCR Detection System (BioRad) using the following thermal cycling parameters to selectively amplify excision products: polymerase activation and DNA denaturation (98° C. for 2.5 min), 40 cycles of amplification (98° C. for 10 s, 60° C. for 20 s), and terminal melt-curve analysis (65-95° C. in 0.5° C. per 5 s increments).

[0237] To confirm the sensitivity of qPCR-based measurements from genomically integrated mini-Tn, lysates were prepared from a control MG1655 strain, and a strain containing a genomically-encoded IS element that disrupts the lacZ gene. Similar to the plasmid-based assay, variable IS element excision frequencies were simulated across five orders of magnitude (ranging from 0.002% to 100%) by mixing cell lysates the control strain and the IS-encoding strain in various ratios, and showed accurate detection of excision products in genomic IS element excision assays in vivo to a frequency of 0.001 (FIG. 12B).

[0238] Mating-out assays. sSL1592, harbors a mini-F plasmid derivative with an integrated spectinomycin cassette. This strain was transformed with a plasmid carrying a mini-Tn harboring a kanamycin marker and either GstTnpA (pSL4245) or catalytically inactive GstTnpA (pSL4974). Cells were selected on LB media containing spectinomycin (100 μg ml⁻¹), carbenicillin (100 μg ml⁻¹), and kanamycin (50 μg ml⁻¹) to generate a donor strain. Three independent colonies were inoculated in liquid LB media containing spectinomycin (100 μg ml⁻¹), carbenicillin (100 μg ml⁻¹), kanamycin (50 μg ml⁻¹), and 0.05 mM IPTG to induce expression of TnpA for 12 h at 37° C. In parallel, the recipient strain harboring genomically encoded resistance for rifampicin and nalidixic acid were grown in liquid LB media containing rifampicin (100 μg/mL) and nalidixic acid (30 μg/mL) for 12 h at 37° C. Cells were 100-fold diluted into fresh liquid LB media with respective antibiotics and grown for 2 h to ˜0.5 OD. Cells were then washed with H₂O and mixed at a concentration of 5×10⁷ for both donor and recipient cells, and plated onto solid LB-agar media with no antibiotic selection. Cells were grown for 20 h at 37° C., scraped off plates, and resuspended in H₂O. Cells were then serially diluted and plated onto LB media containing rifampicin (100 μg/mL), nalidixic acid (30 μg/mL), spectinomycin (100 μg ml⁻¹), and kanamycin (50 μg ml⁻¹) to monitor transposition. In addition, cells were also plated to rifampicin (100 μg ml⁻¹), nalidixic acid (30 μg ml⁻¹), and spectinomycin (100 μg ml⁻¹), to determine the entire transconjugant population. The frequency of transposition was calculated by taking the number of colonies that exhibited Nal^{R}+Rif^{R}+Spec^{R}+Kan^{R} phenotype (e.g., transposition positive), divided by the number of transconjugants that exhibited a Nal^{R}+Rif^{R}+SpecR phenotype. Transconjugants showing resistance to nalidixic acid, rifampicin, spectinomycin, and kanamycin were isolated using Zymo Research ZR BAC DNA miniprep kit and sequenced using nanopore long-read sequencing (Plasmidsaurus). Reads were analyzed in Geneious Prime (2023.0.1) by using a custom blast database to identify reads containing mini-Tn and flanking mini-F plasmid sequence. Insertion events were aligned to Mini-F plasmid reference to identify sites of integration.

[0239] Plasmid interference assays. Plasmid interference assays were performed in E. coli BL21 (DE3) (FIGS. 3C, 3F, 10A-10B, and 10D) or E. coli str. K-12 substr. MG1655 (sSL0810) strains for all other experiments. For FIG. 3C (TnpB homologs), BL21 (DE3) cells were transformed with pTarget plasmids, and single colony isolates were selected to prepare chemically competent cells. 400 ng of pEffector plasmids were then delivered via transformation. After 3 h, cells were spun down at 4000 g for 5 min and resuspended in 20 μl of H₂O. Cells were then serial diluted (10×) and transferred to LB media containing spectinomycin (100 μg ml⁻¹), kanamycin (50 μg ml⁻¹), and 0.05 mM IPTG and grown for 24 h at 37° C. For all remaining spot assays using MG1655 strains, chemically competent cells were first prepared with pEffector plasmid and then transformed with 400 ng of pTarget plasmids. After 3 h, cells were spun down at 4000 g for 5 min and resuspended in 20 μl of H₂O. Cells were then serial diluted (10×) and transferred to LB media containing spectinomycin (100 μg ml⁻¹), kanamycin (50 μg ml⁻¹), and 0.05 mM IPTG and grown for 14 h at 37° C. Plates were imaged in an Amersham Imager 600.

[0240] Quantification of plasmid interference was calculated by determining the number of colony forming units (CFUs) following transformation. Cells were first transformed with pEffector plasmids and prepped as chemically competent cells for a second round of transformation with 200 ng of pTarget. Cells were then spun down at 4000 g for 5 min and resuspended in 100 μL of H₂O. Cells were then serial diluted and plated to LB media containing spectinomycin (100 μg ml⁻¹), kanamycin (50 μg ml⁻¹). 0.05 mM IPTG was added to media when T7 promoter was used. CFUs were counted following 24 h of growth at 37° C. Frequencies were normalized relative to a non-targeting guide RNA.

[0241] Genome targeting and cell killing assays. Cell killing assays via genomic targeting with TnpB (FIGS. 3H and 10E) or IscB (FIG. 3H) were performed by transforming E. coli str. K-12 substr. MG1655 (sSL0810) strains with spectinomycin-resistant plasmids constitutively expressing TnpB/IscB and either genomic targeting or non-targeting guide RNAs. Cells were transformed with 400 ng plasmid. After 3 h, cells were spun down at 4000 g for 5 min and resuspended in 20 μl of H₂O. Cells were then serial diluted (10×) and transferred to LB media containing spectinomycin (100 μg ml⁻¹) and grown for 24 h at 37° C.

[0242] ChIP-seq experiments and library preparation. ChIP-seq experiments were generally performed as described previously (Sec, Hoffmann, F. T. et al., Nature 609, 384-393 (2022), incorporated herein by reference). The following active site mutations were introduced to inactivate the endonuclease domains of the respective 3×Flag-tagged proteins to simulate DNA binding prior to DNA cleavage: GstIscB (D87A, H₂₃₈A, H₂₃₉A); GstTnpB (D196A); SpyCas9 (D10A, H₈₄₀A); AsCas12a (D908A). E. coli BL21 (DE3) cells were transformed with a single plasmid encoding the catalytically inactive effector and either a lacZ targeting ωRNA or non-targeting ωRNA. After incubation for 16 h at 37° C. on LB agar plates with antibiotics (200 μg ml⁻¹ spectinomycin), cells were scraped and resuspended in 1 ml of LB. The optical density at 600 nm (OD600) was measured, and approximately 4.0×10⁸ cells (equivalent to 1 ml with an OD600 of 0.25) were spread onto two LB agar plates containing antibiotics (200 μg ml⁻¹ spectinomycin) and supplemented with 0.05 mM IPTG. Plates were incubated at 37° C. for 24 h. All cell material from both plates was scraped and transferred to a 50 ml conical tube.

[0243] Cross-linking was performed by mixing 1 ml of formaldehyde (37% solution; Thermo Fisher Scientific) to 40 ml of LB medium (˜1% final concentration) followed by immediate resuspension of the scraped cells by vortexing and 20 min of gentle shaking at room temperature. Cross-linking was stopped by the addition of 4.6 ml of 2.5 M glycine (˜0.25 M final concentration) followed by 10 min incubation with gentle shaking. Cells were pelleted at 4° C. by centrifuging at 4,000 g for 8 min. The following steps were performed on ice using buffers that had been sterile-filtered. The supernatant was discarded, and the pellets were fully resuspended in 40 ml TBS buffer (20 mM Tris-HCl pH 7.5, 0.15 M NaCl). After centrifuging at 4,000 g for 8 min at 4° C., the supernatant was removed, and the pellet was resuspended in 40 ml TBS buffer again. Next, the OD600 was measured for a 1:1 mixture of the cell suspension and fresh TBS buffer, and a standardized volume equivalent to 40 ml of OD600=0.6 was aliquoted into new 50 ml conical tubes. A final 8 min centrifugation step at 4,000 g and 4° C. was performed, cells were pelleted and the supernatant was discarded. Residual liquid was removed, and cell pellets were flash-frozen using liquid nitrogen and stored at −80° C. or kept on ice for the subsequent steps.

[0244] Bovine serum albumin (GoldBio) was dissolved in 1×PBS buffer (Gibco) and sterile-filtered to generate a 5 mg ml-1 BSA solution. For each sample, 25 μl of Dynabeads Protein G (Thermo Fisher Scientific) slurry (hereafter, beads or magnetic beads) were prepared for immunoprecipitation. Up to 250 μl of the initial bead slurry were prepared in a single tube, and washes were performed at room temperature, as follows: the slurry was transferred to a 1.5 ml tube and placed onto a magnetic rack. The supernatant was removed, 1 ml BSA solution was added, and the beads were fully resuspended by vortexing, followed by rotating for 30 s. This was repeated for three more washes. Finally, the beads were resuspended in 25 μl (×n samples) of BSA solution, followed by addition of 4 μl (×n samples) of monoclonal anti-Flag M2 antibodies produced in mouse (Sigma-Aldrich). The suspension was moved to 4° C. and rotated for >3 h to conjugate antibodies to magnetic beads. While conjugation was proceeding, cross-linked cell pellets were thawed on ice, resuspended in FA lysis buffer 150 (50 mM HEPES-KOH pH 7.5, 0.1% (w/v) sodium deoxycholate, 0.1% (w/v) SDS, 1 mM EDTA, 1% (v/v) Triton X-100, 150 mM NaCl) with protease inhibitor cocktail (Sigma-Aldrich) and transferred to a 1 ml milliTUBE AFA Fiber (Covaris). The samples were sonicated on a M220 Focused-ultrasonicator (Covaris) with the following SonoLab 7.2 settings: minimum temperature, 4° C.; set point, 6° C.; maximum temperature, 8° C.; peak power, 75.0; duty factor, 10; cycles/bursts, 200; 17.5 min sonication time. After sonication, samples were cleared of cell debris by centrifugation at 20,000 g and 4° C. for 20 min. The pellet was discarded, and the supernatant (˜1 ml) was transferred into a fresh tube and kept on ice for immunoprecipitation. For non-immunoprecipitated input control samples, 10 μl (˜1%) of the sheared cleared lysate were transferred into a separate 1.5 ml tube, flash-frozen in liquid nitrogen and stored at −80° C.

[0245] After greater than 3 h, the conjugation mixture of magnetic beads and antibodies was washed four times with BSA solution as described above, but at 4° C. Next, the beads were resuspended in 30 μl (× n samples) FA lysis buffer 150 with protease inhibitor, and 31 μl of resuspended antibody-conjugated beads were mixed with each sample of sheared cell lysate. The samples rotated overnight for 12-16 h at 4° C. for immunoprecipitation of Flag-tagged proteins. The next day, tubes containing beads were placed on a magnetic rack, and the supernatant was discarded. Then, six bead washes were performed at room temperature, as follows, using 1 ml of each buffer followed by sample rotation for 1.5 min: (1) two washes with FA lysis buffer 150 (without protease inhibitor); (2) one wash with FA lysis buffer 500 (50 mM HEPES-KOH PH 7.5, 0.1% (w/v) sodium deoxycholate, 0.1% (w/v) SDS, 1 mM EDTA, 1% (v/v) Triton X-100, 500 mM NaCl); (3) one wash with ChIP wash buffer (10 mM Tris-HCl pH 8.0, 250 mM LiCl, 0.5% (w/v) sodium deoxycholate, 0.1% (w/v) SDS, 1 mM EDTA, 1% (v/v) Triton X-100, 500 mM NaCl); and (4) two washes with TE buffer 10/1 (10 mM Tris-HCl pH 8.0, 1 mM EDTA). The beads were then placed onto a magnetic rack, the supernatant was removed, and the beads were resuspended in 200 μl of fresh ChIP elution buffer (1% (w/v) SDS, 0.1 M NaHCO₃). To release protein-DNA complexes from beads, the suspensions were incubated at 65° C. for 1.25 h with gentle vortexing every 15 min to resuspend settled beads. During this incubation, the non-immunoprecipitated input samples were thawed, and 190 μl of ChIP Elution Buffer was added, followed by the addition of 10 μl of 5 M NaCl. After the 1.25 h incubation of the immunoprecipitated samples was complete, the tubes were placed back onto a magnetic rack, and the supernatant containing eluted protein-DNA complexes was transferred to a new tube. Then, 9.75 μl of 5 M NaCl was added to ˜195 μl of eluate, and the samples (both immunoprecipitated and non-immunoprecipitated controls) were incubated at 65° C. overnight to reverse-cross-link proteins and DNA. The next day, samples were mixed with 1 μl of 10 mg ml 1 RNase A (Thermo Fisher Scientific) and incubated for 1 h at 37° C., followed by addition of 2.8 μl of 20 mg ml 1 proteinase K (Thermo Fisher Scientific) and 1 h incubation at 55° C. After adding 1 ml of buffer PB (QIAGEN recipe), the samples were purified using QIAquick spin columns (QIAGEN) and eluted in 40 μl TE buffer 10/0.1 (10 mM Tris-HCl pH 8.0, 0.1 mM EDTA).

[0246] ChIP-seq Illumina libraries were generated for immunoprecipitated and input samples using the NEBNext Ultra II DNA Library Prep Kit for Illumina (NEB). Sample concentrations were determined using the DeNovix dsDNA Ultra High Sensitivity Kit. Starting DNA amounts were standardized such that an approximately equal mass of all input and immunoprecipitated DNA was used for library preparation. After adapter ligation, PCR amplification (12 cycles) was performed to add Illumina barcodes, and ˜450 bp DNA fragments were selected using two-sided AMPure XP bead (Beckman Coulter) size selection, as follows: the volume of barcoded immunoprecipitated and input DNA was brought up to 50 μl with TE Buffer 10/0.1; in the first size-selection step, 0.55×AMPure beads (27.5 μl) were added to the DNA, the sample was placed onto a magnetic rack, and the supernatant was discarded and the AMPure beads were retained; in the second size-selection step, 0.35×AMPure beads (17.5 μl) were added to the DNA, the sample was placed onto a magnetic rack, and the AMPure beads were discarded and the supernatant was retained. The concentration of DNA was determined for pooling using the DeNovix dsDNA High Sensitivity Kit.

[0247] Illumina libraries were sequenced in paired-end mode on the Illumina MiniSeq and NextSeq platforms with automated demultiplexing and adapter trimming (Illumina). For each ChIP-seq sample, >1,000,000 raw reads (including genomic and plasmid-mapping reads) were obtained.

[0248] ChIP-seq data analyses. ChIP-seq data analysis was generally performed as described previously (Sec, Hoffmann, F. T. et al., Nature 609, 384-393 (2022), incorporated herein by reference). In brief, ChIP-seq paired-end reads were trimmed and mapped to an E. coli BL21 (DE3) reference genome (GenBank: CP001509.3). Genomic lacZ and lacI regions, partially identical to plasmid-encoded genes, were masked in all alignments (genomic coordinates: 335,600-337,101 and 748,601-750,390). In the ChIP-seq analysis of Cas9 and Cas12a, rrnB t1 terminator genomic sequence was masked (genomic coordinates: 4,121,275-4,121,400). Mapped reads were sorted, indexed, and multi-mapping reads were excluded. Aligned reads were normalized by RPKM and visualized in IGV. For genome-wide views, maximum read coverage values were plotted in 1-kb bins. Peak calling was performed using MACS3 with respect to non-immunoprecipitated control samples of TnpB and Cas9. The peak summit coordinates in the MACS3 output summits.bed file were extended to encompass a 200-bp window using BEDTools. The corresponding 200-bp sequence for each peak was extracted from the E. coli reference genome using the command bedtools getfasta. Sequence motifs were determined using MEME ChIP. Individual off-target sequences (FIG. 11) represent sequences from the top enriched peaks determined by MACS3 that contain the MEME ChIP motif.

[0249] TAM library cloning. TAM libraries were cloned containing a 6-bp randomized sequence between the native target sequences for GstIscB (ISGst5) and GstTnpB2 (ISGst2). In brief, two partially overlapping oligos (oSL9404 and oSL9405) were annealed by heating to 95° C. for 2 min and then cooled to room temperature. One of these oligos (oSL9404) contained a 6-nt degenerate sequence flanked by target sites for GstTnpB2 and GstIscB. Annealed DNA was treated with DNA Polymerase I, Large (Klenow) Fragment (NEB) in 40 μL reactions and incubated at 37° C. for 30 min, then gel purified (QIAGEN Gel Extraction Kit). Double-stranded insert DNA and vector backbone (pSL4031) was digested with BamHI and HindIII (37° C., 1 h). The digested insert was cleaned-up (Qiagen MinElute PCR Purification Kit), and digested backbone was gel-purified (Qiagen QIAquick Gel Extraction Kit). The backbone and insert were ligated with T4 DNA Ligase (NEB). Ligation reactions were transformed in with electrocompetent NEB 10-beta cells according to the manufacturer's protocol. After recovery (37° C. for 1 h), cells were plated on large bioassay plates containing LB agar and kanamycin (50 μg ml⁻¹). Approximately 5 million CFUs were scraped from each plate, representing 1000× coverage of each library member, and plasmid DNA was isolated using the Qiagen CompactPrep Midi Kit.

[0250] TAM library assays and NGS library prep. DNA solutions containing 500 ng of the TAM plasmid library (pSL4841) and 500 ng of plasmids encoding either GstTnpB2 (pSL4369) or GstIscB (pSL4514) were co-transformed in electrocompetent E. coli BL21 (DE3) cells according to the manufacturer's protocol (Sigma-Aldrich). Cells were serially diluted on large bioassay plates containing LB agar, spectinomycin (100 μg ml⁻¹), and kanamycin (50 μg ml⁻¹). Approximately 600,000 CFUs were scraped from plates, representing 100× coverage of each library member, and plasmid DNA was isolated using the Qiagen CompactPrep Midi Kit. Illumina amplicon library for NGS was prepared through 2-step PCR amplification. In brief, ˜50 ng of plasmid DNA recovered from TAM assay was used in each “PCR-1” amplification reaction with primers flanking the degenerate TAM library sequence and containing universal Illumina adaptors as 5′ overhangs. Amplification was carried out using high-Fidelity Q5 DNA Polymerase (NEB) for 16 thermal cycles. Samples from “PCR-1” amplification were diluted 20-fold and amplified for “PCR-2” in 10 thermal cycles with primers contain indexed p5/p7 sequences. Reactions were verified by analytical gel electrophoresis. Sequencing was performed with a paired-end run using a MiniSeq High Output Kit with 150-cycles (Illumina).

[0251] Analyses of NGS TAM library data. Analysis of TAM depletion library was performed using a custom Python script. Demultiplexed reads were filtered to remove reads that did not contain a perfect match to the 58-bp sequence upstream of the degenerate sequence for any i5-reads. For reads that passed this filtering step, the 6-nt degenerate sequence was extracted and counted. The relative abundance of each degenerate sequence in a sample was determined by dividing the degenerate sequence count by the total number of sequence counts for that sample. Then, the fold-change between the output and input libraries was calculated by dividing the relative abundance of each degenerate sequence in the output library by its relative abundance in the input library, and then log 2-transformed. Sequence logos were constructed by taking the 10 most depleted sequences and generated using WebLogo (v2.8).

[0252] Transposition assays combining TnpA and TnpB. E. coli str. K-12 substr. MG1655 (sSL0810) was engineered to carry a genomic integrated mini-Tn containing a kanamycin resistance cassette inserted into lacZ by recombineering as described above to generate sSL2771. This strain was transformed with either pCDFDuct-1 (pSL0007) or various GstTnpB carrying vectors (pSL4369, pSL4664, pSL4518 and pSL4740, see Table 8 for description) and selected on LB agar containing spectinomycin (100 μg ml⁻¹) and kanamycin (50 μg ml⁻¹). Single colony isolates of cells harboring each plasmid were prepared chemically competent and transformed with a TnpA expression vector (pSL4529) or a catalytically inactive mutant TnpA expression vector (pSL4534) and selected on LB agar containing carbenicillin (100 μg ml⁻¹), spectinomycin (100 μg ml⁻¹) and kanamycin (50 μg ml⁻¹). Three single colony isolate of each transformant were grown in liquid LB containing carbenicillin (100 μg ml⁻¹), spectinomycin (100 μg ml⁻¹) and kanamycin (50 μg ml⁻¹) and grown for 14 h at 37° C. Optical density (OD) of each culture was measured and approximately 10⁷ cells were plated onto MacConkey agar media containing carbenicillin (100 μg ml⁻¹), spectinomycin (100 μg ml⁻¹) and 0.05 mM IPTG for TnpA induction. Importantly, the media did not contain kanamycin to allow for excision of the mini-Tn. Cells were grown at 37° C. for 4 days on MacConkey media to enrich for mini-Tn excision events. Cells were then harvested, serially diluted, and plated onto LB agar containing carbenicillin (100 μg ml⁻¹), spectinomycin (100 μg ml⁻¹) and X-gal (200 mg ml 1) or carbenicillin (100 μg ml⁻¹), spectinomycin (100 μg ml⁻¹), kanamycin (50 μg ml⁻¹) and X-gal (200 mg ml 1) and grown for 18 h at 37° C. Total number of colonies were counted, along with the number of blue colonies to determine the frequency of excision and reintegration events. In addition, genomic lysate was harvested from cells as described above for PCR analysis.

[0253] Statistics and reproducibility. qPCR and analytical PCRs resolved by agarose gel electrophoresis gave similar results in three independent replicates. Sanger sequencing of excision products was performed once for each isolate. Next-generation sequencing of PCR amplicons was performed once. Plasmid interference assays were performed in three independent replicates. Transposition assays combining TnpA and TnpB were performed with three independent replicates.

[0254] Data availability. Next-generation sequencing data are available in the National Center for Biotechnology Information (NCBI) Sequence Read Archive: SRX19058888-SRX19058905, SRR23476356-SRR23476358 (BioProject Accession: PRJNA925099) and the Gene Expression Omnibus (GSE223127). The published genome used for ChIP-seq analyses was obtained from NCBI (GenBank: CP001509.3). The published genome used for bioinformatics analyses of the Geobacillus stearothermophilus genome was obtained from NCBI (GenBank: NZ_CP016552.1).

[0255] Code availability. Custom scripts used for bioinformatics, TAM library analyses, and ChIP-seq data analyses are available at GitHub (github.com/sternberglab/Meers_et_al_2023).

### Example 1

### G. Stearothermophilus Encodes Diverse TnpB/IscB Homologs

[0256] The NCBI NR database was mined for TnpB/IscB homologs and phylogenetic trees were built that highlight the diversity of both protein families (FIGS. 6A and 6D). When extracting flanking genomic regions, only a sporadic association with Y1 tyrosine transposases was identified, with ˜25% of all tnpB genes containing an identifiable tnpA nearby, indicative of autonomous transposons. Interestingly, iscB genes were much less abundant than tnpB and rarely associated with tnpA (˜1.5%). This suggested that the vast majority of tnpB/iscB genes are encoded within transposons lacking tnpA, suggesting a non-autonomous function that would indicate transposases encoded elsewhere mobilize them in trans (FIGS. 6A and 6D). TnpB but not iscB genes were also found associated with an unrelated serine resolvase (also denoted tnpA) that is a hallmark of IS607-family transposons, albeit at a much lower frequency (˜8%) (FIG. 6D).

[0257] A conserved intergenic region upstream of iscB was bounded by the transposon right end (RE), and bore similarity to a non-coding RNAs. Both IscB and TnpB use these transposon-encoded RNAs, referred to hereafter as ωRNAs, as guides to direct cleavage of complementary dsDNA substrates, in a mechanism analogous to Cas9 and Cas12. Covariation models were generated for TnpB- and IscB-specific ωRNAs, which revealed the conserved secondary structural motifs characteristic of both guide RNAs (FIGS. 1B and 6B), and these models were used to demonstrate the tight genetic linkage between tnpB/iscB genes and flanking ωRNA loci (FIGS. 6A and 6D). In order to investigate whether ωRNA production might be sensitive to local genetic context, the orientation of genes upstream of iscB were analyzed throughout the diverse members in the phylogenetic tree and a strong bias for genes encoded in the same orientation was observed (FIG. 6C). Since IscB-specific ωRNAs comprise a constant scaffold sequence derived from the transposon RE, joined by a 5′-adjacent guide region encoded outside of the transposon boundary, ωRNA biogenesis relies on transcription initiating outside of the IS element and proceeding towards the iscB ORF (FIG. 6B). Genomic insertions into transcriptionally active target sites may aid in the generation of functional ωRNAs, and these insertion products are either preferentially generated (during transposition) or preferentially retained. Notably, this orientation bias was absent for TnpB, whose ωRNA substrates rely on transcription that initiates within the IS element itself (described below), and for an unrelated IS630-family transposase that were included as a negative control (FIG. 6C).

[0258] Geobacillus stearothermophilus (Gst), a thermophilic soil bacterium, has a substantial expansion of five IS605-family elements encoding both TnpB and IscB, denoted ISGst1-5, collectively comprising ˜ 1% of the entire genome (FIG. 1C). Analysis of small RNA sequencing data revealed that ωRNAs from multiple transposons were constitutively expressed (FIG. 1D), and the left end (LE) and right end (RE) boundaries of these IS elements were highly similar in DNA sequence (FIGS. 7A-7D), suggesting a common mechanism of mobilization. Using this information, a candidate tnpA gene responsible for transposing these elements was identified, as well as minimal non-autonomous IS elements that lacked protein-coding genes altogether and resembled palindrome-associated transposable elements (PATEs; FIG. 7E).

[0259] Interestingly, in addition to sharing similar sequences within the LE and RE, ISGst1-5 elements exhibited conserved, clade-specific transposon-adjacent motifs and transposon-encoded motifs (TAMs and TEMs; FIGS. 7A-D). Prior studies on the TnpA transposase from Helicobacter pylori IS608, which transposes a related IS605-like element, revealed that these motifs constitute the target and cleavage sites recognized during transposon insertion and transposon excision reactions, respectively. Yet rather than being recognized exclusively through protein-DNA recognition, these motifs form non-canonical base-pairing interactions with a DNA ‘guide’ sequence located in the sub-terminal ends of the IS element (FIG. 2A). Focusing on multiple sequence alignments between ISGst1-5 elements, covarying mutations between both the TAM/TEM sequences and their associated DNA guide sequences were observed (FIGS. 2A, 7A and 7B).

### Example 2

### GstTnpA is Active for DNA Excision and Transposition

[0260] A DNA excision assay was designed to test the activity of GstTnpA on a mini-transposon (mini-Tn) substrate derived from its native autonomous IS element, ISGst1. E. coli expression vectors that encoded GstTnpA upstream of the mini-Tn, which comprised an antibiotic resistance gene flanked by full-length LE and RE sequences and genomic G. stearothermophilus sequences upstream and downstream of the predicted transposon boundaries were cloned. Primers were designed to bind outside the mini-Tn, such that PCR from cellular lysates would amplify either the starting substrate or a shorter reaction product resulting from transposon excision and re-ligation (FIGS. 2A-2B). A parallel panel of substrates containing LE and RE sequences derived from ISGst2-5, which natively encode IscB, TnpB, or ωRNA only, were generated to determine the breadth of GstTnpA substrate recognition. Remarkably, GstTnpA was active on all five families of IS elements, with excision dependent on the predicted catalytic tyrosine residue (FIG. 2C), but failed to cross-react with a DNA substrate derived from an H. pylori IS608 element (FIGS. 8A-8B). Sanger sequencing of excision products revealed that in each case, TnpA precisely re-joined sequences flanking the mini-Tn to generate a scarless donor joint (FIG. 2C), which could be recognized and cleaved by TnpB/IscB (see below). Using an alternative qPCR-based strategy to prime directly off the donor joint sequence, excision frequencies of 0.70% were calculated directly from overnight cultures (FIGS. 8C-8E).

[0261] Excision proceeded regardless of whether the mini-Tn was encoded on the leading or lagging-strand template, but was ablated when either the LE or RE sequence were scrambled, confirming the importance of these regions for TnpA recognition. Excision was also strongly dependent on the presence of a cognate TAM adjacent to the LE as well as a compatible DNA ‘guide’ sequence located within the LE, since mutation of either region led to a loss of product formation (FIG. 2E). Interestingly, however, simultaneous mutation of both the TAM and LE guide sequence to the corresponding motifs found in IS608 restored excision activity with GstTnpA (FIG. 2F). Similar base-pairing interactions occur between a DNA ‘guide’ sequence within the RE and a matching TEM found at the RE boundary, with only minor differences between the TAM and TEM at positions 3 and 5 (FIGS. 8A and 8B). Whereas the excision reaction did not tolerate mutation of the TAM sequence to the TEM sequence, mutations to the TEM were still tolerated, despite ablating predicted base-pairing interactions with the RE ‘guide’ sequence (FIG. 2F). However, closer inspection revealed that these excision events resulted from erroneous selection of an alternative mini-Tn boundary downstream of the native RE, at a sequence matching the WT TEM (TTCAC; FIGS. 8F-8G). These results indicated that IS200/IS605-family elements tolerate flexible spacing between the TAM/TEM and corresponding guide sequences, allowing for capture of additional sequences outside of the native LE and RE boundaries.

[0262] Using a traditional mating-out assay with the ISGst2 mini-Tn (FIG. 9A), in which transposition events into a conjugative plasmid are isolated via drug selection, transposition efficiencies of 2.5×10−7 were measured, which were several orders of magnitude lower than the observed rates of transposon excision (FIGS. 8E and 9B). These results suggest that, under the tested experimental conditions, TnpA expression would eventually lead to permanent transposon loss from the cell population, absent any active mechanisms for maintaining transposons at their donor sites during or after excision (see below). Long-read sequencing of drug-resistant transconjugants confirmed the presence of novel mini-Tn insertions, which were invariably located downstream of endogenous TAM sites on the F-plasmid (FIG. 9C). Collectively, these experiments demonstrated that GstTnpA is active in mobilizing a large network of diverse, IS605-like elements found in the G. stearothermophilus genome, but that its intrinsic enzymatic properties render transposons vulnerable to being permanently lost from the population without an active mechanism for donor-site preservation.

### Example 3

### GstTnpB and IscB Homologs Function as RNA-Guided Endonucleases

[0263] With knowledge that GstTnpA was active in mobilizing diverse IS elements, nuclease activity for the associated GstTnpB/IscB proteins was tested using a plasmid interference assay, in which successful targeting leads to plasmid cleavage and a loss of cellular viability (FIG. 3B). Expression plasmids encoding both TnpB/IscB and the corresponding ωRNA guides derived from their native GstIS elements (pEffector) were designed, alongside target plasmids containing donor joints that were bioinformatically identified and experimentally verified in TnpA excision assays (pTarget; FIGS. 2D and 3A). After screening various promoter combinations driving expression of the nuclease and ωRNA (FIG. 10A), GstIscB and three GstTnpB distinct homologs were highly active for RNA-guided DNA cleavage of their native donor joints (FIGS. 3C and 3D). Interestingly, HpyTnpB encoded by the well-studied IS608 element was inactive when tested under similar conditions, whereas the activity for DraTnpB was confirmed (FIG. 10B).

[0264] The TAM on pTarget was systematically mutagenized and DNA cleavage was ablated with even single-bp changes, which would also render the site of ωRNA biogenesis at the transposon RE, where the motif differs from the cognate TAM in only two positions, completely unrecognizable (FIGS. 3E-3F and 10C-10D). TnpB and IscB were both functional for genomic targeting and cleavage as well, and point mutations in the predicted HNH and/or RuvC nuclease domains completely ablated activity (FIGS. 3G and 3H). Interestingly, a panel of three TnpB-specific ωRNAs targeting lacZ showed varying levels of activity, as assessed by cell lethality (FIG. 10E).

[0265] To investigate binding specificity in more detail, ChIP-seq experiments were performed to map all chromosomal binding sites of nuclease-dead IscB and TnpB programmed with lacZ-specific ωRNAs (FIG. 4A). The resulting data revealed strong enrichment at the on-target site and numerous off-targets (FIGS. 11A-11D), and the majority of peaks shared highly conserved consensus motifs of 5′-TTCAT-3′ (IscB from ISGst5) and 5′-TTTAT-3′ (TnpB2 from ISGst2) (FIGS. 4B-4C), which precisely matched the TAM motifs neighboring the native ISGst5 and ISGst2 elements, respectively (FIG. 7A). Similar consensus motifs emerged when cleavage activity in cells was tested using pTarget libraries containing degenerate TAM sequences (FIG. 4D), indicating common sequence determinants for DNA target binding and cleavage. Neither IscB nor TnpB exhibited a strong requirement for extensive complementarity within the seed sequence for the off-target sites analyzed (FIGS. 11A-11B), and this absence was particularly striking in comparison to matched experiments with Cas9 and Cas12a, which were strongly dependent on 3-5 nt of PAM-adjacent sequence matching the guide RNA (FIGS. 11C-11D). Cas9 and Cas12 may have evolved a greater degree of reliance on RNA-DNA complementarity for stable DNA binding, whereas IscB and TnpB may be dependent on a more extensive TAM motif but permissive of RNA-DNA mismatches.

### Example 4

### RNA-Guided Nucleases Promote Transposon Retention Through Targeted DSBs

[0266] To test if IscB/TnpB nucleases with compatible ωRNAs would rapidly intercept the donor joint products generated upon transposon excision by TnpA and promote reinstallation of transposon copies at pre-existing donor sites, an E. coli strain harboring a lacZ-interrupting mini-Tn that was inserted downstream of a TnpB-compatible TAM was generated, such that scarless excision by TnpA would result in a phenotypic switch from lacZ (white colony phenotype) to functional lacZ+ (blue colony phenotype; FIG. 5A). Strains were transformed with expression plasmids encoding TnpA (or an inactive mutant) and TnpB (or an inactive mutant), programmed with either a non-targeting ωRNA or a lacZ-targeting ωRNA designed to cleave the donor joint generated upon TnpA-mediated mini-Tn excision. After enriching for excision events by growing strains on MacConkey agar, cells were plated on media containing X-gal and performed blue-white colony screening. Using this approach, the emergence of a large fraction of blue colonies were observed in the presence of WT TnpA, but not a catalytically inactive mutant, and colony PCR analysis confirmed that these colonies had indeed permanently lost the transposon at the donor lacZ locus (FIGS. 5B-5D). When a similar population of cells was plated onto X-gal plates that also contained kanamycin, thus selecting for the presence of the mini-Tn, blue colonies were 1000× less abundant (FIG. 5C), confirming that the frequency of transposon excision at the donor site vastly exceeds the frequency of transposon integration at a new target site.

[0267] Remarkably, co-expression of TnpB and a lacZ-specific ωRNA completely eliminated the emergence of blue colonies under otherwise identical conditions, and colony PCR confirmed that transposons were uniformly maintained at their original genomic location (FIGS. 5B-5D and 12). This phenotypic effect was dependent on both a targeting ωRNA and an intact TnpB nuclease domain, indicating that targeting/binding alone is insufficient for transposon retention at the donor site, but that targeted cleavage and local DSB formation facilitate the effect. TnpB nucleases preserve transposons at the donor site that are otherwise lost via TnpA-mediated excision, through formation of targeted DSBs and ensuing recombination (FIG. 5E).

### Example 5

### Methods for DNA and RNA Modification Using IStron-Derived Enzymes and Self-Splicing RNAs

[0268] Insertion sequences (IS) are the simplest mobile genetic elements found in bacteria which encode only the genes for their mobilization and retention. Those usually include two open reading frames, namely TnpA and TnpB. There are two main classes of IS elements, IS605 and IS607, which have homologous tnpB, but evolutionary unrelated tnpA genes. IS605 elements harbor a Y1 tyrosine transposase, which mediates transposition via single stranded DNA intermediate. IS607 TnpA is a serine resolvase, capable of cleaving and re-joining double stranded DNA.

[0269] Interestingly, some TnpA and TnpB homologs are encoded within group I introns, generating chimeric genetic elements called IStrons. These elements are not only mobile on the DNA level, due to TnpA and TnpB, but are phenotypically silent on the RNA level because the whole element is removed during splicing. IStrons can harbor TnpA and TnpB proteins related to either IS605 or IS607, suggesting multiple IS element acquisition events by group I intron during evolution. Some of the IStrons encoding proteins from IS607 elements were found in pathogenic bacteria species of Clostridium botulinum.

[0270] An IStron homolog from this species showed that TnpB (CboTnpB) is active for double-stranded DNA cleavage in E. coli. Here, TnpB from IS607 elements cleaves DNA when both TAM and target-complementary ωRNA guide are present and this activity is dependent on its RuvC active site. The same active site is also responsible for ωRNA maturation on the 5′ end. The transposase (CboTnpA) associated with this TnpB recognizes CboIStron ends and can excise the element from its native location. Lastly, the CboIStron can self-splice from the E. coli RNA transcript.

[0271] ωRNA covariation analyses. A ωRNA covariance model was built by performing blastp search for ChoTnpB protein (Table 3). Top 50 homologs were retrieved together with 3 kb sequence upstream and downstream of ChoTnpB gene. The sequences were clustered using CD-HIT and MAFFT was used to identify IStron boundaries. 220 nt upstream from 3′ end of mobile genetic element was extracted from each member and a structure-based multiple alignment was then performed using mLocARNA with the following parameters:
[0272] --max-diff-am 25--max-diff 60--min-prob 0.01--indel-50--indel-open-750--plfold-span 100--alifold-consensus-dp

[0273] The resulting alignment with structural information was used to generate a new ωRNA covariance model with the Infernal suite, refined with Expectation-Maximization from CMfinder and verified with R-scape at an E-value threshold of 1e-5. The resulting ωRNA covariance model was used with cmsearch to discover new ωRNAs within top 1000 hits from blastp search for CboTnpB protein. The new identified sequences were used to iterate the initial model.

[0274] Cloning Expression vectors (pEffector) and target plasmids (pTarget), were designed as described previously using a variety of methods, including inverse (around-the-horn) PCR, Gibson assembly, restriction digestion-ligation, and ligation of hybridized oligonucleotides. pEffector encodes a codon optimized CboTnpB (or CboTnpB (D190A)) and an ωRNA under the control of two separate constitutive promoters on a pCDF-Duct-1 vector. In this experiment, target plasmids (pTarget) were designed to encode a 40-bp complementary target sequence to ωRNA guide, on a pCOLA backbone. Representative plasmid sequences are listed in Tables 7 and 8.

[0275] Targeted plasmid DNA cleavage in E. coli Plasmid interference assays were performed in E. coli str. K-12 substr. MG1655. The cells were transformed with pEffector plasmids and single colony isolates were selected to prepare chemically competent cells. These cells were transformed with 200 ng of pTarget plasmids by heat shocking at 42° C. for 30 sec, followed by recovery at 37° C. for 1 h. The cells were then spun down at 4000 g for 5 min and resuspended in 30 μl of MilliQ H₂O. Cells were then serially diluted (10×) and plated on LB-agar media with spectinomycin (100 μg ml⁻¹) and kanamycin (50 μg ml⁻¹). Cells were grown for 24 h at 37° C. and plates were imaged in an Amersham Imager 600.

[0276] TAM library assays and NGS library prep. To unbiasedly determine ChoTnpB TAM sequence a plasmid library with 6 degenerate nucleotides 5′ of the target sequence was used. DNA solutions containing 500 ng of the TAM plasmid library (pSL4841) and 500 ng of plasmids encoding either ChoTnpB with a targeting ωRNA (pSL5002) or ChoTnpB with a non-targeting ωRNA (pSL4902) were co-transformed in electrocompetent E. coli BL21 (DE3) cells according to the manufacturer's protocol (Sigma-Aldrich). Cells were serially diluted on large bioassay plates containing LB agar supplemented with spectinomycin (100 μg ml⁻¹) and kanamycin (50 μg ml⁻¹). Approximately 400,000 CFUs were scraped from plates, representing 100× coverage of each library member. Plasmid DNA was isolated using the Qiagen CompactPrep Midi Kit. Illumina amplicon library for NGS was prepared through a 2-step PCR amplification. In brief, ˜25 ng of plasmid DNA recovered from TAM assay was used in each 1^{st} step PCR amplification reaction with primers flanking the degenerate TAM library sequence and containing universal Illumina adaptors as 5′ overhangs. Amplification was carried out using high-Fidelity Q5 DNA Polymerase (NEB) for 15 thermal cycles. Samples from 1^{st} step PCR amplification were diluted 20-fold and amplified for 2nd step PCR in 10 thermal cycles with primers containing indexed p5/p7 sequences. Reactions were verified by analytical gel electrophoresis. Sequencing was performed with a single-end run using a MiniSeq High Output Kit for 75-cycles (Illumina).

[0277] Analyses of NGS TAM library data. Analysis of TAM depletion library was performed using a custom Python script. Demultiplexed reads were filtered to remove reads that did not contain a perfect match to the 58-bp sequence upstream of the degenerate sequence for any i5-reads. For reads that passed this filtering step, the 6-nt degenerate sequence was extracted and counted. The relative abundance of each degenerate sequence in a sample was determined by dividing the degenerate sequence count by the total number of sequence counts for that sample. Then, the fold-change between the output and input libraries was calculated by dividing the relative abundance of each degenerate sequence in the output library by its relative abundance in the input library, and then log 2-transformed. Sequence logos were constructed by taking the 50 most depleted sequences and generated using WebLogo (v2.8).

[0278] RIP-seq to capture mature ωRNA. RNA-immunoprecipitation (RIP) followed by sequencing was used to detect mature ωRNA bound by ChoTnpB. Cells expressing 3×FLAG-CboTnpB and bioinformatically predicted ωRNA were grown until they reached an exponential phase, then pelleted, resuspended in lysis buffer and sonicated. Resulting lysate was centrifuged and supernatant left to incubate overnight at 4° C. with Dynabeads, conjugated with anti-FLAG antibodies. The bound fraction was eluted, with TRIzol and chloroform, followed by RNA purification using Zymo RNA Clean & Concentrator Kit. Purified RNA was fragmented and treated with Turbo DNase, purified using Zymo RNA Clean & Concentrator Kit and used for library preparation with NEBNext Small RNA Library Prep Set for Illumina. Sequencing was performed with a paired-end run using a MiniSeq High Output Kit for 150-cycles (Illumina). Resulting reads were mapped using BWA and custom Python script.

[0279] Excision assay with CboTnpA. To monitor excision MG1655 cells were transformed with TnpA expressing plasmid. The obtained transformants were used to make chemically competent cells that were then transformed with donor DNA containing plasmid. Double-transformants were plated on LB agar with selective antibiotics and IPTG for the induction of TnpA expression. Resulting colonies were scraped from the plate and lysed by boiling at 95° C. for 10 min. The lysate was centrifuged, and the supernatant was used for PCR.

[0280] Splicing assay of CboIStron. Cells expressing CboIStron were grown until they reached exponential phase. They were pelleted and total RNA was extracted using TRIzol and chloroform. RNA was concentrated using NEB Monarch RNA Cleanup Kit. 200 ng of total RNA were treated with dsDNAse and reverse-transcribed using SuperScript IV Reverse Transcriptase. Resulting cDNA was used for PCR.

[0281] Investigating ChoTnpB DNA cleavage It was hypothesized that ChoTnpB could be binding an ωRNA, which was likely encoded at the 3′ end of mobile genetic element. From the knowledge about TnpB from IS605 elements, the RNA was expected to be ˜200-250 nt in length and could be partially overlapping with TnpB coding sequence. ChoTnpB homologs were aligned and a covariation model for the expected coding region of ωRNA was built. The 3′ end of IStron has a conserved secondary structure indicating that the transcript might be functional at RNA level (FIG. 13). Therefore, 220 nt upstream of 3′ IStron end were used as a scaffold for the guide RNA. A likely ChoTnpB target could its donor joint, which is formed at the genomic location once IStron is excised by TnpA. In the case of Clostridium botulinum IStron (CboIStron), the motif upstream of mobile genetic element is 5′-TGG, which were selected to be used as TAM. Downstream of it a native sequence found 3′ of IStron was cloned in and ωRNA guide were designed to be complementary to it.

[0282] To test whether ChoTnpB is able to cleave double-stranded DNA in E. coli a plasmid interference assay was designed (FIG. 14A). E. coli was transformed with a pEffector plasmid (encoding CboTnpB and ωRNA), and then transformed with pTarget plasmids. When the target is recognized and cleaved, bacteria lose resistance to antibiotic encoded by pTarget. ChoTnpB DNA cleavage utilized both TAM and ωRNA guide complementarity to the target sequence (FIG. 14B).

[0283] TnpB proteins have a predicted RuvC nuclease domain, which is also found in widely studied class II CRISPR-Cas nucleases (Cas9 and Cas 12). By mutating one of its active site residues ChoTnpB loses its activity confirming that DNA cleavage is RuvC-dependent (FIG. 14C).

[0284] Additionally, RNA sequencing was performed to determine the mature form of CboTnpB ωRNA. Using RNA immunoprecipitation followed by sequencing (RIP-seq) a 197 bp long RNA which precipitated together with ChoTnpB was detected. Interestingly, a sharp processing site at 5′ end was observed only when ChoTnpB RuvC domain was intact, suggesting its role in ωRNA maturation (FIG. 14D). There was no significant difference between 3′ end boundary between nuclease active and dead ChoTnpB variants, suggesting that it is being truncated by cellular nucleases. When looking at the covariation model, ChoTnpB cleavage spot lands right at the base of a highly conserved stem loop, suggesting that it might be important for maturation (FIG. 14E).

[0285] Reprogramming of ChoTnpB To unbiasedly probe how stringent TAM preference CboTnpB has, a library cleavage experiment was performed (FIG. 15A). A similar experimental setup was used, but instead of a single pTarget a plasmid library that has a degenerate 6N nucleotide sequence was used. The ωRNA guide sequence was also changed to be complimentary to the sequence downstream of the 6N motif (FIG. 15B). By plating on selective media and harvesting the surviving clones, the most depleted library members were identified by NGS. This experiment confirmed that ChoTnpB can be reprogrammed to cleave a different DNA target than the native one, and 5′-TGG is the most favored TAM sequence, which is readily recognized and cleaved by ChoTnpB (FIG. 15C).

[0286] CboIStron exhibits self-splicing in E. coli Due to their left and right end similarity to group I introns, IStrons are predicted to be silent mobile genetic elements, capable of cleaving themselves out of RNA transcript (FIG. 16A). To investigate if CboIStron retains self-splicing ability a minimal IStron (lacking tnpA and tnpB genes) was constructed and RT-PCR was performed to capture splicing products. Being guided by predicted IStron right end (ωRNA) fold some predicted structural features were removed to test minimal requirements for intron splicing (FIG. 16B). This assay revealed that removing up to three inner stem loops leads to increased splicing activity, but splicing was ablated when the outer-most stem loop is lost (FIG. 16C).

[0287] CboTnpA can excise IStron from its genomic location Just as the self-splicing activity can remove IStron from RNA transcript, so can CboTnpA permanently excise the element form any gene at the DNA level and integrate it elsewhere (FIG. 17A). The activity of CboTnpA was reconstituted in E. coli and monitored excision by doing PCR to amplify the excision junction. CboTnpA effectively excised minimal IStron, but the effect was lost when IStron encoded CboTnpB (FIG. 17B).

### Example 6

### Methods for Programmable RNA-Guided DNA Cleavage Using TnpB Homologs

[0288] Recent genome editing methods have largely depended on Cas9- or Cas 12-like nucleases with an associated guide RNA (sometimes referred to as gRNA or sgRNA). These nucleases are guided to a target site complementary to their respective sgRNA and generate DNA double strand breaks (DSBs) at the target site. In some embodiments, a ssDNA or dsDNA donor template may be introduced as well for homologous recombination to occur, leading to the knock-in of a desired DNA sequence. In some embodiments, one active site of the nuclease may be inactivated via specific amino acid mutations, resulting in a “nickase”. In some embodiments, the nuclease protein may be catalytically inactive. In some embodiments, the nuclease can be fused to various effector proteins, including, but not limited to, a reverse transcriptase, a DNA deaminase, a transcriptional activator, or a transcriptional repressor. However, current editing methods are still limited due to the large coding size of typical genome editors, and many have focused on identifying smaller Cas9 orthologs to enable more efficient delivery methods. Furthermore, Cas9 orthologs from thermophilic species lend further opportunities for improved genome editing, as thermostable systems show improved behavior in human cells. TnpB and IscB proteins derived from G. stearothermophilus are appealing nucleases for genome editing given their small reading frame and potential thermostability.

[0289] Investigating TnpB and IscB editing efficiencies in human cells To investigate the editing efficiencies of TnpB and IscB proteins, all components were human-codon optimized and were appended with a C-terminal bipartite-NLS sequence. Omega RNA sequences (referred to as ωRNA) were cloned immediately downstream of a U6 promoter, with a poly-T terminator immediately downstream. Various target sites within the HEK3 locus were targeted for each system, with the appropriate TAM sequences chosen, where TAM represents the transposon/target-adjacent sequence (Table 7). Cells were seeded in 48-well plates approximately 18-24 hours prior to transfection, and cells were transfected with 200 ng of a TnpB or IscB expression plasmid, 200 ng of the ωRNA expression plasmid, and 10 ng of a drug marker to select for transfected cells. Cas9 and a gRNA expression plasmid targeting HEK3 was used as a positive control comparison. Transfected cells were selected for the transfection marker for 3 days, and then harvested for editing analysis. Samples were analyzed via targeted PCR, next generation sequencing, and CRISPResso2 analysis. TnpB and IscB proteins exhibited a range of detectible editing efficiencies across target sites at the HEK3 locus. Editing efficiencies are reported in FIG. 18. Several systems, including TnpB (derived from ISGst3) and TnpB (derived from ISGst4) exhibited robust editing efficiencies with single-digit efficiencies.

### Example 7

### Methods for Increasing Site-Specific DNA Recombination Efficiencies Using TnpA (Y1) Transposase

[0290] TnpB Insertion sequences (IS) are compact and pervasive transposable elements found in bacteria and archaea, which canonically encode only the genes for their mobilization and maintenance. IS200/IS605 transposons undergo ‘peel-and-paste’ transposition catalyzed by a TnpA transposase, but intriguingly, they also encode diverse, TnpB- and IscB-family proteins that are evolutionarily related to the CRISPR-associated effectors Cas12 and Cas9, respectively. TnpB-family enzymes function as RNA-guided DNA endonucleases, but the broader biological role and their associated activity with TnpA has remained enigmatic. Co-expression of TnpA and TnpB to direct targeted double-stranded breaks (DSBs) results in a substantial increase in recombination frequencies, surpassing rates observed with TnpB alone. The hyper-recombination frequency mediated by the TnpA transposase can be used to increase DSB-dependent site-specific recombination, overcoming limitations in the low efficiency of DSB-dependent recombination for site-specific DNA integration.

[0291] TnpA (Y1) increases site-specific DNA recombination following DSBs. IS200/IS605 elements encode two genes: tnpA, which encodes a transposase containing a catalytic tyrosine residue responsible for DNA excision and integration of the mobile genetic element; and tnpB or iscB, which encode RNA-guided DNA nucleases termed TnpB or IscB. While the function of each gene in separation has been determined, the role of these proteins in combination has been unknown.

[0292] IS200/IS605-like elements couple TnpA-mediated excision, resulting in a scarless excision event, with TnpB RNA-guided DNA cleavage, that targets the excised element during transposition, leading to DNA recombination and reinstallation of the IS element back into the donor site. An assay was developed to monitor recombination events occurring between a plasmid-encoded IS element inserted into full-length lacZ, and its corresponding lacZ donor joint site encoded on the genome (FIG. 30A). Upon E. coli transformation, TnpB and ωRNA expression leads to targeted DNA double-strand breaks within the genomic lacZ locus, leading to one of two potential outcomes: cell death from unresolved DNA damage, or cell survival via homologous recombination with the lacZ locus on the ectopic plasmid, effectively copying the ISGst2 element into the genome and disrupting the target site. These outcomes were scored by quantifying the number of surviving colonies that were lacZ⁺ (uncleaved/mutated, blue colony phenotype) or lacZ⁻ (recombination products, white colony phenotype; FIG. 30A).

[0293] An approximate 500× reduction in cell survival was observed after transformation with the WT ISGst2 element, and this effect was ablated with inactivating nuclease mutations (FIGS. 30B-30C). Intriguingly, an autonomous element that also encoded TnpA led to a 50-fold increase in colony counts, and 98% of the surviving colonies were lacZ, indicating a disruption of the target site (FIGS. 30B-30C), and was dependent on the catalytic activity of TnpA. To verify that genomic lacZ disruption resulted from insertion of the plasmid-encoded ISGst2 element, colony PCR and long-read Nanopore sequencing of multiple isolates were performed, which revealed the occurrence of scarless recombination events (FIG. 30D). These results highlight the powerful role of the TnpB nuclease in creating double-stranded breaks, and the ability of TnpA to stimulate site-specific recombination. These findings provide insights into potential biological mechanisms that can be utilized for genome editing and targeted site-specific recombination through the use of double-stranded brakes.

[0294] In certain embodiments, the incorporation of IS200/IS605 transposon ends into a pDonor substrate, which also contains additional homology arms at integration sites, facilitates the stimulation of DNA recombination reliant on double-strand breaks (DSBs). This technique can be applied to various cell types, including bacterial cells, plant cells, animal cells, and human cells. For instance, mammalian cells can be transfected with a sequence of interest for DNA insertion, accompanied by TnpA and a DNA nuclease capable of inducing site-specific DSBs, thereby enabling site-specific recombination at the DSB site. The DNA nuclease may comprise CRISPR/Cas effectors (e.g., Cas9 or Cas12), RNA-guided DNA nucleases encoded by insertion sequences (e.g., IscB, IsrB, TnpB, or Fanzor), or homing endonucleases (e.g., ISce-I, ICre-I, HO).

[0295] In certain embodiments, the IS200/IS605 transposon ends utilized do not include stop codons and incorporate reading frames or linker sequences (such as glycine-serine linkers). These modifications facilitate the insertion of cargo payloads in-frame, into a target gene of interest, resulting in seamless fusions at the protein level with custom polypeptide sequences encoded by the cargo. Consequently, it becomes feasible to append a sequence of interest to a specific protein within the genome.

### Example 8

### DNA Transposition, RNA Self-Splicing, and RNA-Guided DNA Cleavage by Multi-Functional Transposable Elements

### Protein Detection and Database Curation

[0296] TnpB: Database was previously curated as described above. There, homologs of TnpB proteins were comprehensively detected using the H. pylori (HpyTnpB) TnpB amino acid sequence (NCBI Accession: WP_078217163.1) and a G. stearothermophilus TnpB amino acid sequence (NCBI Accession: WP_047817673.1) as seed queries for two independent iterative JackHMMER (HMMER suite v3.3.2) searches against the NR database (retrieved on Jun. 11, 2021), with an inclusion and reporting threshold of 1e-30. The union of the two searches was taken, and proteins that were less than 250 aa were removed to trim partial or fragmented sequences, resulting in a database of 95,731 non-redundant TnpB homologs. Contigs of all putative tnpB loci were retrieved from NCBI for downstream analysis using the Bio. Entrez package.

[0297] TnpA_{Y} and TnpA_{S}: For TnpB-associated contigs, TnpA_{Y} was detected using the Pfam Y1_Tnp (PF01797) model for a HMMsearch from the HMMR suite (v3.3.2), with an E-value threshold of 1e-4. This search was performed on the curated CDSs of each contig from NCBI. IS elements that encoded TnpB homologs within 1,000 bp of a detected TnpA_{Y} were defined as autonomous. Analysis of TnpA_{S} association with TnpB was performed with the same methodology mentioned above, but with Pfam serine resolvase (PF00239) model.

[0298] Arc-like ORF: A manually identified Arc-like protein (NCBI Accession: WP_003367503.1) was used as the seed query in a two-round PSI-BLAST search against the NR database (retrieved on Aug. 17, 2023). A neighborhood analysis was conducted on ORFs within 10 KB of all detected Arc-like ORF loci using HMMscan from the HMMR suite (v3.3.2) with the Pfam database of HMMs (retrieved on September 2023), and TnpB homologs were specifically searched for using the TnpB-specific models produced from the JackHMMER. High frequency associations with Arc-like ORFs were manually inspected and putative functional associations were manually annotated.

ncRNA Covariation Analyses

[0299] Group I Intron: The initial search for group I introns associated with TnpB was performed using the Group I Intron Sequence and Structure Database models of available subclasses, refined by Nawrocki et al. 2018 (Nucleic Acids Res. 2018 Sep. 6; 46 (15): 7970-7976) and Zhou et al. 2008 (Nucleic Acids Res. 2008 January; 36 (Database issue): D31-7). The 14 Group I intron subclass models were searched against all identified TnpB associated contigs with cmscan (Infernal v1.1.4). A liberal minimum bit score of 15 was used to capture distant or degraded introns, and the identification of a putative IStron was supported by its proximity, orientation, and relative location to the nearest identified TnpB ORF. Remaining intron hits were considered associated with TnpB if they were upstream, on the same strand, and within a 1000 bp of a TnpB ORF. After inspecting the database of models, most only captured the catalytic subdomains of the intron and lacked other substructures both 5′ and 3′ of the hit. To address this, the boundaries of the group I intron found to be associated with TnpBs were refined and used to generate a more accurate, comprehensive covariance model. Hits to the models for loci with TnpBs closely related to the C. botulinum TnpB experimentally tested in the study were retrieved. The 1500 bp upstream of those TnpBs were extracted and clustered by 99% length coverage and 99% alignment coverage using CD-HIT to remove identical sequences. The resulting sequences were aligned using MAFFT-EINSI for 8 iterations. The 5′ boundary of the intron (and the LE of the IStron) was manually identified as the boundary of significant drop-off of sequence identity in the alignment. Sequences were subsequently trimmed to that boundary. A structure-based multiple alignment was then performed using mLocARNA (v1.9.1) with the following parameters:
[0300] --max-diff-am 25--max-diff 60--min-prob 0.01--indel-50--indel-open-750--plfold-span 100--alifold-consensus-dp

[0301] The resulting alignment with structural information was used to generate a new group I intron covariance model with the Infernal suite and refined/verified by R-scape at an E-value threshold of 1e-5. The resulting covariance model was used with cmsearch to discover new group I introns within the curated TnpB associated contig database. The resulting sequences were aligned to generate a new CM model that was used to again search the TnpB-associated contig database. After refinement, the final group I intron CM model was searched against the entire NT database (retrieved on Aug. 29, 2023) with a higher bit-score of 40.

[0302] ωRNA: The initial boundaries of the ωRNA associated with the IStron TnpBs were identified as described above. To refine these models to get structures more representative of IStron605 and IStron607 elements, sequences 200 bp downstream and 50 bp upstream of the last nucleotide of the TnpB ORF were extracted to define the RE and transposon boundaries. The ˜150-bp sequences were clustered by 99% length coverage and 99% alignment coverage using CD-HIT to remove duplicates. The remaining sequences were then clustered again by 95% length coverage and 95% alignment coverage using CD-HIT. This was done to identify clusters of sequences that were closely related but not identical, as expected of IS elements that have recently mobilized to new locations. For the 100 largest clusters, which all had a minimum of 10 sequences, MUSCLE (v3.8.1551) with default parameters was used to align each cluster of sequences. Then, each cluster alignment was manually inspected for the boundary between high conservation and low conservation, or where there was a stark drop-off in mean pairwise identity over all sequences. This point was annotated for each cluster as the putative 3′ end of the IS elements. If there was no conservation boundary, sequences in these clusters were expanded by another 150 bp, in order to capture the transposon boundaries, and realigned. The consensus sequence of each alignment (defined by a 50% identity threshold up until the putative 3′ end) was extracted, and rare insertions that introduced gaps in the consensus were manually removed. With the 3′ boundary of the IS element, and thus the 3′ boundary of the TnpB ωRNA properly defined, a covariance model of the TnpB ωRNA could be built.

[0303] 200-bp window of sequence upstream of the 3′ end for elements of the CboIStron clade and the CdiIStron clade was extracted. A structurally based multiple alignment was then performed using CMfinder and used to generate a TnpB-specific ωRNA covariance model with Infernal and refined/verified with R-scape at an E-value threshold of 1e-5. This was iterated twice to generate the covariation model for each of the two classes of IStrons.

### Phylogenetic Analyses

[0304] TnpB and Arc-like ORF: For TnpB found in putative IStron elements, protein sequences were clustered at 95% length coverage and 95% alignment coverage using CD-HIT. The clustered representatives were taken and aligned using MAFFT (v7.508) with the E-INS-I method for 16 rounds. Post-alignment cleaning consisted of using trimA1 (v1.4.rev15) to remove columns containing more than 99% of gaps and manual inspection. The phylogenetic tree was created using IQ-Tree 2 (v2.1.4) with a model of substitution identified using ModelFinder, and optimized trees with nearest neighbor interchange to minimize model violations. Branch support was evaluated with 1000 replicates of SH-aLRT, aBayes, and ultrafast bootstrap support from the IQTREE package. The tree with the highest maximum likelihood was used as the reconstruction of the IStron TnpB phylogeny.

[0305] All Arc-like ORF hits were aligned using MAFFT (v7.508) with the E-INS-I method for 8 rounds. The rest of the analysis was identically performed as above.

[0306] Group I Introns: For all the group I intron hits from the search against the NT database, hits smaller than 300 bp were removed. The remaining sequences were clustered at 90% length coverage and 90% alignment coverage using CD-HIT. The clustered representatives were taken and aligned using MAFFT (v7.508) with the E-INS-I method for 2 rounds. Post-alignment cleaning consisted of using trimA1 (v1.4.rev15) to remove columns containing more than 99% of gaps and manual inspection. The phylogenetic tree was created using IQ-Tree 2 (v2.1.4) with a model of substitution identified using ModelFinder, and optimized trees with nearest neighbor interchange to minimize model violations. Branch support was evaluated with 1000 replicates of SH-aLRT, aBayes, and ultrafast bootstrap support from the IQTREE package. The tree with the highest maximum likelihood was used as the reconstruction of the group I intron phylogeny. Neighborhood analysis was performed similarly to how the Arc-like ORFs were analyzed.

Culturing of Clostridia senegalense

[0307] A Clostridia strain encoding IStrons with similarity of ˜80% to CboIStron was obtained from ATCC (strain 25772), where it was defined as belong to an unknown species classification. Internal rRNA phylogenetic analysis led to the assignment of this strain as a member of species senegalense. Clostridia senegalense was cultured from a lyophilized ATCC pellet in 5 mL of Gifu Anaerobic Medium Broth, Modified (mGAM; HyServe, 05433) under anaerobic conditions (5% H₂, 10% CO₂ and 85% N₂) in an anaerobic chamber. All media was pre-reduced for ˜24 h before use in culturing. C. senegalense was then banked as a glycerol stock (final concentration 20%) and sub-cultured into 100 mL cultures of mGAM. The growth of these cultures was monitored with a spectrophotometer over ˜6 h until a final OD600 of 0.4-0.6 (exponential phase), at which point cultures were poured into two 50 mL falcon tubes and cooled on ice for 10 minutes. The cultures were then centrifuged at 4,000 g for 10 minutes at 4° C., supernatant decanted, and cell pellets flash frozen in liquid nitrogen. Pellets were stored at −80° C. until RNA extraction and processing.

### RNA Extraction

[0308] RNA from the Clostridia senegalense cell pellets were extracted in 96-well format using a silica bead beating-based protocol adapted from a prior study. Briefly, 200 μl 0.1 mm Zirconia Silica beads (Biospec, 11079101Z) were added to each well of 96-well deep-well plates (Thermo Fisher Scientific, 07-202-505). Next, cell pellets were resuspended in 500 μL DNA/RNA shield buffer (Zymo) and transferred to each well and the plates were affixed with a scaling mat (Axygen, AM-384-DW-SQ) and centrifuged for 1 minute at 4,500 g. To avoid overheating during bead beating, the plates were vortexed for 5 seconds and incubated at −20° C. for 10 minutes before beating. Then, plates were fixed on a bead beater (Biospec, 1001) and subjected to bead beating for 5 minutes, followed by a 10 minute cooling period. The bead beating cycle was repeated three times total and plates were the centrifuged at 4,500×g for 5 minutes to spin down cell debris. Next, 60% of the bead beating volume was transferred to the Zymo Quick-RNA Miniprep Plus kit (Cat. No. R1057) and RNA was purified using the manufacturer's protocol for gram positive bacteria. RNA quality was assessed using the 260/280 nm ratio (˜2.0) as measured by Nanodrop (Cat. No.) and concentration was measured by the Qubit RNA High Sensitivity Assay Kit (Cat. No. Q32852) using the manufacturer's protocol. RNA was stored at −80° C. until library preparation.

### Total RNA and Small-RNA Sequencing

[0309] For total RNA-seq library preparation, 10 μg of purified RNA was treated with Turbo DNase I (Thermo Fisher Scientific) for 1 h at 37° C. using the manufacturer's protocol. A 2× volume of Mag-Bind TotalPure NGS magnetic beads (Omega) was added to each sample and the RNA was purified using the manufacturer's protocol. The RNA was then diluted in NEBuffer 2 (NEB) and fragmented by incubating at 92° C. for 1.5 minutes. To generate RNA with 5′ monophosphate and 3′ hydroxyl ends, samples were treated with RppH (NEB) supplemented with SUPERase. In RNase Inhibitor (Thermo Fisher Scientific) for 30 min at 37° C., followed by T4 PNK (NEB) in 1× T4 DNA ligase buffer (NEB) for 30 min at 37° C. Samples were column-purified using RNA Clean & Concentrator-5 (Zymo) and the concentration was determined using the DeNovix RNA Assay.

[0310] For sRNA-seq, a protocol was adapted for Clostridia senegalense from a prior study. 10 μg of purified RNA and 1 μg of Century+ RNA markers (Invitrogen, Cat. No. AM7145) were first mixed with 2×RNA loading dye at a 1:1 ratio and heat denatured at 95° C. for 5 minutes. Next, the samples were loaded into separate wells of a pre-cast 5% denaturing urea polyacrylamide gel and run at 250 V for 45 minutes in 1×TBE at 4° C. until the bromophenol blue dye front ran off the gel. Gels were stained with 20 μL of SybrGold dye and 1×TBE on a rotator for 5 minutes. Gels were then visualized on a blue light box and bands ranging from just below 100 bp and just above 500 bp were excised using a fresh razor blade and transferred to a 2 mL centrifuge tube. 0.3 M NaCl was added to the gel slices, vortexed, and left rotating overnight at 4° C. The next day, the tubes were centrifuged at 17,000 g for 1 minute to collect tiny gel slices to the bottom of the tube and the supernatant was transferred into three fresh 1.5 mL centrifuge tubes with 340 μL each. 1 μL of GlycoBlue was added to each tube and vortex, followed by addition of 3 volumes of 100% ethanol to each tube and incubation on ice for 1 h. The tubes were then centrifuged at 17,000 g for 15 minutes at 4° C., vortexed for 10 seconds to strip precipitates, and centrifuged for another 15 minutes at 4° C. Supernatant was gently removed with a pipet to avoid the pellet and 900 μL of ice-cold 75% ethanol was added, followed by a brief vortex and centrifugation at 17,000 g for 5 minutes at 4° C. This was repeated for 2 washes in total. After removal of residual ethanol, RNA pellets were air-dried for 10 minutes at room temperature and dissolved in 20 μL of nuclease-free ultra-pure water. Samples were immediately put on ice or stored at −80° C. 1 μg of purified small RNA was then treated with Turbo DNase I (ThermoFisher Cat. No. AM2238) for 1 h at 37° C. using the manufacturer's protocol. 2× volume of Mag-Bind TotalPure NGS magnetic beads (Omega) were added to each sample and the RNA was purified using the manufacturer's protocol. End repair was performed as described above for total RNA-seq libraries.

[0311] For both total RNA and small RNA samples, Illumina adapter ligation and cDNA synthesis were performed using the NEBNext Small RNA Library Prep kit. Dual index barcodes were added by PCR amplification (12 cycles), and the cDNA libraries were purified using the Monarch PCR & DNA Cleanup Kit (NEB). High-throughput sequencing was performed on an Illumina NextSeq 550 in paired-end mode with 150 cycles per end.

Whole Genome Sequencing of Clostridia senegalense

[0312] Genomic DNA from Clostridia senegalense was extracted using the Promega Wizard Genomic DNA purification kit, following the manufacturer's protocol for gram-positive bacteria. DNA was measured by fluorescent quantification. TnY, a homolog of Tn5, was purified in-house following previous methods. 10 ng of purified gDNA was tagmented with TnY preloaded with Nextera Read 1 and Read 2 oligos, followed by proteinase K treatment (NEB, final concentration 16 units per mL) and column purification. PCR amplification and Illumina barcoding was done for 13 cycles with KAPA HiFi Hotstart ReadyMix; the PCR reaction was then resolved on a gel, and a smear from 400 bp to 800 bp was extracted for sequencing on a paired end, 150×150 NextSeq kit. Downstream analysis was performed as described in total RNA sequencing. De novo genome assembly was also performed by Plasmidsaurus, and the assembled genome was in agreement with the 4 Mbp genome provided for ATCC 25772.

### Targeted Tagmentation-Based Detection of IS Excision Events

[0313] 100 ng of purified gDNA of Clostridia senegalense was tagmented with TnY preloaded with full-length Nextera Read 2/Indexed oligos. An initial PCR amplification was done with a forward oligo that anneals in the upstream genomic sequence flanking the IStron and an oligo that anneals to the P7 sequence using KAPA HiFi Hotstart with an annealing temperature of 55° C. and 1 minute extension time. After bead cleanup using Omega Mag-Bind TotalPure magnetic beads at a ratio of 0.9×, a second PCR was done with an oligo that annealed to the initial PCR amplicon within ˜40 bp of the genomic-IStron junction. This forward oligo had all necessary sequences for Illumina sequencing. After 15 cycles of PCR under the same conditions, the reaction was resolved on a gel, and a smear from 350 bp to 800 bp was extracted for sequencing with at least 75 Read 1 cycles. After adapter trimming, the relative abundance of reads that contain a 20 bp sequence of the IStron end or contain a 20 bp sequence of the downstream genomic sequence were tallied using BBDuk from the BBTools suite (v.38.00; sourceforge.net/projects/bbmap) with a hamming distance of 2 and an average Qscore greater than 20.

### RNA-Sequencing Analyses

[0314] RNA-seq data were processed using cutadapt v4.2 to remove adapter sequences, trim low-quality ends from reads, and exclude reads shorter than 18 bp. Reads were mapped to the reference genome (Cdi: NZ_CP010905.2; Cse: ATCC 25772) using the splice-aware aligner STAR v2.7.10, with --outFilterMultimapNmax 10. Mapped reads were sorted and indexed using SAMtools v1.17. Splice junctions inferred by STAR flanking loci of interest were used to create a custom genome annotation file for a second round of STAR alignment in order to refine spliced read counts. Sashimi plots showing read coverage and spliced reads at specific loci were generated with ggsashimi v1.1.5 in strand-specific mode. To quantify splicing activity at each intron locus, reads were mapped to a mock reference sequence spanning either the 5′ exon-intron junction, 3′ exon-intron junction, or the exon-exon junction. Reads mapping to each junction were quantified using featureCounts v2.0.2, with a minimum overlap of 3 bp on either end of the junction. Splicing activity was calculated as the number of reads mapping to the exon-exon junction divided by the average of reads mapping to the exon-intron junctions.

### RIP-Seq

[0315] E. coli str. K-12 substr. MG1655 (sSL0810) was transformed with 3×FLAG-CboTnpB (pSL5412) or 3×FLAG-CboTnpB (D189A) (pSL5413) and ωRNA encoding plasmids. Single colonies were inoculated in liquid LB with spectinomycin (100 μg ml⁻¹) and grown overnight. Next day the culture was inoculated at 100× dilution in 50 ml of liquid LB with spectinomycin (100 μg ml⁻¹) and grown until OD600 reached 0.5. 10 ml of culture centrifuged at 4,000 g for 10 min at 4° C. and supernatant removed. The pellet was washed once with 1 ml of cold TBS, centrifuged at 10,000 g for 5 min at 4° C., supernatant removed and resulting pellet flash-frozen in liquid nitrogen. Pellets stored at −80° C. Antibodies for immunoprecipitation were conjugated to magnetic beads as follows: for each sample, 30 μl Dynabeads Protein G (Thermo Fisher Scientific) was washed 3× in 1 ml RIP lysis buffer (20 mM Tris-HCl pH 7.5, 150 mM KCl, 1 mM MgCl₂, 0.2% Triton X-100), resuspended in 1 ml RIP lysis buffer, combined with 10 μl anti-FLAG M2 antibody, and rotated for >3 h at 4° C. Antibody-bead complexes were washed an additional 3× to remove unconjugated antibodies, and were resuspended in 30 μl RIP lysis buffer per sample.

[0316] To generate cell lysates, flash-frozen pellets were first resuspended in 1.2 ml RIP lysis buffer supplemented with complete Protease Inhibitor Cocktail (Roche) and SUPERase·In RNase Inhibitor (Thermo Fisher Scientific). Cells were then sonicated for 1.5 min total (2 sec ON, 5 sec OFF) at 20% amplitude. To clear cell debris and insoluble material, lysates were centrifuged for 15 min at 4° C. at 21,000×g, and the supernatant was transferred to a new tube. At this point, a small volume of each sample (24 μl, or 2%) was set aside as the “input” starting material and stored at −80° C.

[0317] For immunoprecipitation, each sample was combined with 30 μl antibody-bead complex and rotated overnight at 4° C. The next day, each sample was washed 3× with ice-cold RIP wash buffer (20 mM Tris-HCl pH 7.5, 150 mM KCl, 1 mM MgCl₂). After the last wash, beads were resuspended in 1 ml TRIzol (Thermo Fisher Scientific) and incubated at RT for 5 min to allow separation of RNA from the beads. A magnetic rack was used to isolate the supernatant, which was transferred to a new tube and combined with 200 μl chloroform. Each sample was mixed vigorously by inversion, incubated at RT for 3 min, and centrifuged for 15 min at 4° C. at 12,000 g. RNA was isolated from the upper aqueous phase using the RNA Clean & Concentrator-5 kit (Zymo), eluting in 15 μl RNase-free water. RNA from input samples was isolated in the same manner using TRIzol and column purification.

[0318] For RIP-seq library preparation (input and RIP eluates), 6 μl RNA was diluted in FastAP Buffer (Thermo Fisher Scientific) supplemented with SUPERase. In RNase Inhibitor (Thermo Fisher Scientific) to a total volume of 18 μl, and fragmented by heating to 92° C. for 1.5 minutes. Each sample was treated with 2 μl TURBO DNase for 30 min at 37° C. and column-purified using the RNA Clean & Concentrator-5 kit (Zymo), eluting in 12.5 μl RNase-free water. RNA concentration was quantified using the DeNovix RNA Assay. Illumina sequencing libraries were prepared using the NEBNext Small RNA Library Prep kit, and libraries were sequenced on an Illumina NextSeq 500 in paired-end mode with 75 cycles per end.

Plasmid and E. coli Strain Construction

[0319] Genes encoding CboTnpA and native CboIStron sequence were synthesized by Twist Bioscience. E. coli codon optimized ChoTnpB and bioinformatically predicted ωRNA were synthesized and cloned into a single pCDF-duct vector by Genscript, with two separate J-23 series promoters driving their expression. Transposase expression plasmids were generated using Gibson assembly, by inserting TnpA gene downstream of pLac or T7 promoters in minimal pCOLADuet-1 vector constructed as above. Native IStron, IStron with TnpB only and mini-IS sequence (581 bp from the right end and 221 bp of the right end) were cloned using Gibson assembly, by inserting them into a pCDF-duet vector downstream of T7 promoter. pTarget plasmids were generated by around-the-horn PCR, inserting 44-bp a target sequence into a minimal pCOLDA-Duet-1 vector. Transposition intermediate (pDonorCI) was generated by Gibson assembly of CboIStron left end (581 bp), right end (221 bp), R6K ori and chloramphenicol resistance gene. Cloning mix was transformed to pir+ strain, to allow for the propagation of R6K ori bearing plasmid. Derivatives of these plasmids were cloned using a combination of methods, including Gibson assembly, restriction digestion-ligation, ligation of hybridized oligonucleotides, Golden Gate Assembly and around-the-horn PCR. Plasmids were cloned, propagated in NEB Turbo cells (NEB) (except for pCircInt derivatives, which were propagated in pir+ strain), purified using Miniprep Kits (Qiagen), and verified by Sanger sequencing (GENEWIZ).

DNA Cleavage Assays with TnpB

[0320] Plasmid interference assays were performed in E. coli str. K-12 substr. MG1655 (sSL0810) when synthetic ChoTnpB expression construct was used, and in E. coli BL21 (DE3) strain for all other experiments. When ChoTnpB was co-expressed with ωRNA from the same plasmid, BL21 (DE3) cells were transformed with a pEffector plasmid, and single colony isolates were selected to prepare chemically competent cells. 200 ng of pTarget plasmid were then delivered via transformation. After 2 h, cells were spun down at 6000 rpm for 5 min and resuspended in 30 μl of LB. Cells were then serially diluted (10×) and plated on LB agar media containing spectinomycin (100 μg ml⁻¹) and kanamycin (50 μg ml⁻¹) and grown for 24 h at 37° C. Plates were imaged in an Amersham Imager 600. For the experiments when mini-IS was used as a guide for ChoTnpB, BL21 (DE3) cells were co-transformed with mini-IS and TnpB expression plasmids, and single colony isolates were selected to prepare chemically competent cells. Second transformation was performed as indicated previously, and cells were plated on LB agar media containing spectinomycin (100 μg ml⁻¹), chloramphenicol (25 μg ml⁻¹), kanamycin (50 μg ml⁻¹) and IPTG (0.1 mM) and grown for 24 h at 37° C. Plates were imaged in an Amersham Imager 600.

### TAM Library Experiments and Analyses

[0321] TAM library experiments were prepared for sequencing as previously described.

[0322] Analysis was performed as previously described; in brief, reads were filtered on containing the correct sequence both upstream and downstream of the TAM region. TAM sequences were then extracted, tallied, and depletion values were calculated as the relative abundance of the library member in the input library divided by the relative abundance of the library member in the output. Sequence logos were generated with the library members that were depleted more than 5-fold (depletion value greater than 32) using WebLogo (v2.8), and the top 5% of depleted library members were used to generate TAM wheels.

Transposon Excision Assays with TnpA_{S}

[0323] For each excision assay, E. coli str. K-12 substr. MG1655 was transformed with TnpA expression plasmid and selectively grown on LB with kanamycin (50 μg ml⁻¹). A single colony was used to make chemically competent cells, which were then transformed with 100 ng mini-IS element encoding plasmid. Cultures were grown overnight at 37° C. on LB-agar with spectinomycin (100 μg ml⁻¹), kanamycin (50 μg ml⁻¹) and IPTG (0.5 mM) for TnpA induction. Scraped colonies were resuspended in LB medium. Approximately 3.2× 10⁸ cells (equivalent to 200 μl of cultures with an optical density at 600 nm (OD600)=2.0) were transferred to a 96-well plate. Cells were pelleted by centrifugation at 4,000 g for 5 min and resuspended in 80 μl of H₂O. Next, cells were lysed by incubating at 95° C. for 10 min in a thermal cycler. The cell debris was pelleted by centrifugation at 4,000 g for 5 min, and 10 μl of lysate supernatant was removed and serially diluted with 90 μl of H₂O to generate 10- and 100-fold lysate dilutions for PCR and qPCR analyses, respectively.

Transposon Integration Assays with TnpA_{S}

[0324] Plasmids with an R6K ori, a CmR marker, and inverted IStron ends (pDonorCI) were cloned in pir+ strains. E. coli str. K-12 substr. MG1655 was transformed with a pLac-TnpA expression plasmid and various pDonorCI variants via electroporation, recovered for 7 hours, plated on LB Agar plates with chloramphenicol, and grown for ˜24 hours. Surviving colonies were pooled and genomic DNA was extracted and quantified via Qubit. Approximately 100 ng of gDNA was tagmented with TnY, pre-loaded with Read 2 Nextera oligos. 2 rounds of PCR were performed as described for targeted detection of IS excision events with oligos that annealed to either the left or right IStron end. Paired-end, 76×76 cycle sequencing was performed on a NextSeq platform. Using BBDuk, reads were then filtered for containing the proper IStron end sequence, and the flanking genomic sequence was extracted. Reads that contained the parental pDonorCI sequence were removed during this process. Flanking genomic sequences were then aligned to the E. coli genome using Bowtie2. WebLogo representations were then generated using the input sequence on both the left and right IStron end, as well as the mapped genomic insertion sites.

Transposon Maintenance Experiments with TnpA_{S} and TnpB

[0325] sSL3391, a derivative of E. coli str. K-12 substr. MG1655 with a lacZ deletion replaced by a chloramphenicol resistance cassette, was transformed with 400 ng of plasmid encoding an intact lacZ gene (pSL4825, empty vector) or a CboIStron-interrupted lacZ gene (pSL5948, pSL5949, pSL5950). Following transformation, colonies were plated on MacConkey agar media containing tetracycline (10 μg ml⁻¹) to enrich for IStron excision events. Cells were grown at 37° C. for 36 hours, then harvested, serially diluted, and plated onto LB agar containing tetracycline (10 μg ml⁻¹) and X-gal (200 μg ml⁻¹) and grown for 18 h at 37° C. Total number of colonies were counted, along with the number of blue colonies to determine the frequency of excision and reintegration events. In addition, genomic lysate was harvested from cells as described above for PCR analysis.

Transposon Recombination Assay with TnpA_{S} and TnpB

[0326] E. coli str. K-12 substr. MG1655 (sSL0810) containing an intact lacZ loci were chemically transformed with 400 ng of plasmid encoding an intact lacZ gene (pSL4825, empty vector) or CboIStron-interrupted lacZ gene (pSL5948, pSL5949, pSL5950), recovered for 1 h at 37° C. in liquid LB, and serially diluted on LB-agar plates with tetracycline (10 μg ml⁻¹). Next day colonies were counted and converted to CFUs per μg of DNA. Tetracycline plates were then replica plated to LB-agar plates containing both tetracycline (10 μg ml⁻¹) and X-gal (200 μg ml⁻¹) for blue/white colony screening. White colonies were counted to determine the frequency of recombination events at the genomic lacZ locus.

### In Vitro Splicing Assays

[0327] Templates for in vitro splicing reactions were obtained by PCR amplification of Marker (mock excised), splicing mutant and mini-IS containing plasmids. All templates had a T7 promoter encoded within the plasmid, which is required for transcription. PCR products were extracted from gel and 1 μg of each was used in 50 μl in vitro transcription reaction. Reactions were set up in 30 mM Tris (pH 8.0 at 25° C.), 10 mM DTT, 0.1% Triton X-100, 0.1% spermidine, 60 mM MgCl₂, 0.2 μl SUPERase In™ (Thermo Fisher Scientific), 6 mM each NTP and 0.2 mg/ml of T7 polymerase containing buffer. Reactions were incubated overnight at 37° C. Next day, pyrophosphate precipitate was removed by centrifugation and DNA template digested by adding 1 μl of TURBO™ DNase (2 U/μL) (Thermo Fisher Scientific) and incubating for 30 min at 37° C. Resulting RNA was purified using the NEB Monarch RNA Cleanup Kit. Purified RNA was stored at −80° C.

### In Vivo Splicing Assays

[0328] In vivo splicing assays were performed in E. coli BL21 (DE3) strain transformed with mini-IS variant encoding plasmid, or co-transformed with mini-IS and TnpB expression plasmids. For single plasmid transformations, single colonies were picked from a plate and inoculated to grow overnight in LB with spectinomycin (100 μg ml⁻¹). In the morning, the cultures were re-inoculated at 40× dilution in LB supplemented with spectinomycin (100 μg ml⁻¹) and IPTG (0.1 mM), and grown until OD600 reached 0.5-0.7. Then an aliquot equivalent to 250 μl of cell suspension at OD600 was taken from each culture, centrifuged at 6000 rpm for 5 min and cell pellet resuspended in 750 μl Trizol (Thermo Fisher Scientific). After incubating 10 min at room temperature 150 μl of chloroform was added, tubes shaken and centrifuged at 12,000 g for 15 min at 4° C. Aqueous phase was transferred to a new tube and mixed with equal volume of absolute ethanol (>96%), following RNA purification using the NEB Monarch RNA Cleanup Kit. Purified RNA was stored at −80° C. For splicing assays with TnpB co-expressed in trans, single colonies were inoculated to grow overnight in LB with spectinomycin (100 μg ml⁻¹) and chloramphenicol (25 μg ml⁻¹). In the morning, the cultures were re-inoculated at 40× dilution in LB supplemented with spectinomycin (100 μg ml⁻¹), chloramphenicol (25 μg ml⁻¹) and IPTG (0.5 mM), and grown until OD600 reached 0.5-0.7. All downstream steps were performed as described before.

### Reverse Transcription

[0329] 200 ng of the purified total RNA was used as an input for reverse transcription reaction. First, total RNA was treated with 1 μl dsDNase (Thermo Fisher Scientific) in 1× dsDNase reaction buffer in the final 10 μl volume, incubating at 37° C. for 20 min. Then 1 μl of 10 mM dNTP, 1 μl of 2 mM IStron-interrupted gene-specific primer and 1 μl of 2 mM SpecR specific primer were added for gene-specific priming and reactions were heated at 65° C. for 5 min. Incubation was stopped by placing the tubes directly on ice, followed by addition of 4 μl of SSIV buffer, 1 μl 100 mM DTT, 1 μl SUPERase In™ (Thermo Fisher Scientific) and 1 μl of SuperScript IV Reverse Transcriptase (200 U/μl, Thermo Fisher Scientific) and incubation at 53° C. for 10 min and 80° C. for 10 min. The resulting cDNA was diluted and used for end-point or quantitative PCR. Endpoint PCR was performed in a 20 μl reaction volume containing 1× OneTaq Master Mix (NEB), 0.2 μM of each primer and 1 μl of 100-fold diluted cDNA. Thermal cycling: DNA denaturation (94° C. for 30 s), 30 cycles of amplification (denaturation: 95° C. for 15 s, annealing: 46° C. for 15 s, extension: 68° C. for 15 s), followed by a final extension (68° C. for 5 min). Products were resolved by 1.5% agarose gel electrophoresis and visualized by staining with SYBR Safe (Thermo Fisher Scientific). Quantitative PCR was performed in 10 μl reaction containing 5 μl SsoAdvanced™ Universal SYBR Green Supermix (BioRad), 1 μl H₂0, 2 μl of primer pair at 2.5 μM concentration and 2 μl of 100-fold diluted lysate (10-fold when intron was expressed from a J23114 promoter). Two primer pairs were used: (1) spliced RNAs were captured using a forward primer annealing to exon1 and reverse primer spanning the splice-junction; (2) unspliced products were amplified using the same forward primer annealing to exon1 and reverse primer annealing to IStron left end. Reactions were prepared in 384-well clear/white PCR plates (BioRad), and measurements were performed on a CFX384 RealTime PCR Detection System (BioRad) using the following thermal cycling parameters: polymerase activation and DNA denaturation (98° C. for 2.5 min), 40 cycles of amplification (98° C. for 10 s, 62° C. for 20 s), and terminal melt-curve analysis (decrease from 95° C. to 65° C. in 0.5° C./5 s increments). For each sample, the ratio of spliced/unspliced was obtained by calculating spliced/unspliced=2^{-ΔCq}, where ΔCq=Cq(spliced)−Cq(unspliced).

[0330] Some TnpA and TnpB homologs are encoded within group I introns, generating chimeric genetic elements called IStrons. These elements are not only mobile on the DNA level, due to TnpA and TnpB, but are phenotypically silent on the RNA level because the whole element is removed during splicing. IStrons can harbor TnpA and TnpB proteins related to either IS605 or IS607, suggesting multiple IS element acquisition events by group I intron during evolution. Some of the IStrons encoding proteins from IS607 elements were found in pathogenic bacteria species of Clostridium botulinum. Under low-oxygen conditions these bacteria produce highly dangerous toxins that block nerves and cause muscle and nerve paralysis. An IStron homolog from this species showed that TnpB (ChoTnpB) is active for double-stranded DNA cleavage in E. coli. TnpB from IS607 elements cleaves DNA when both TAM and target-complementary ωRNA guide are present and this activity is dependent on its RuvC active site. The same active site is also responsible for ωRNA maturation on the 5′ end. Transposase (CboTnpA) associated with this TnpB recognizes CboIStron ends and can excise the element from its native location. Lastly, the CboIStron can self-splice from the E. coli RNA transcript.

[0331] TnpA derived from IS607-family transposons represents a serine-family recombinase, hereby indicated by the suffix “(S)” to signify its serine catalytic active site. Contrarily, the previously published Meers work on TnpA corresponds to a tyrosine-family recombinase, distinctly referenced as TnpA (Y), emphasizing its tyrosine catalytic active site. These designations, “(S)” and “(Y)”, underscore the differentiation between these enzyme families or classes of transposons.

[0332] Herein the minimal TnpB ωRNA sequence was defined and some primary sequence elements can be changed while preserving the structural fold of the RNA (e.g., complementary mutations for the pseudo-knot shown in FIG. 33D). Some structural features of ωRNA can be removed (e.g., FIG. 34D, removal of SL4) to attenuate ChoTnpB activity, suggesting that alterations to ωRNA can be made to modulate TnpB activity.

[0333] TnpB derived from C. botulinum originates from the IS607-family elements. IS607-family elements represent a distinct evolutionary lineage, separate from the IS200/IS605-family transposons.

[0334] In some embodiments, RNA splicing activity can be repressed in the presence of TnpB. Different intron sequence elements differ in their susceptibility for TnpB repression (FIG. 33F). It could be possible to have multiple similar copies of the same element in a cell or genome, which would differ only in their right-end encoded ωRNA portion, which is recognized by TnpB. Only the IStron elements that have a TnpB-binding competent ωRNA would be expected to be recognized and their splicing selectively repressed by TnpB.

[0335] IStrons may serve as platforms for introducing selection markers, facilitating their placement within any gene, even those categorized as essential. As evidenced, IStrons can splice at the RNA level, resembling the characteristics of group I introns. When DNA segments containing drug markers are situated within the IStron boundaries, encompassing both the left and right ends crucial for excision and splicing, a seamless genomic integration is achieved, ensuring the original function of the host gene remains undisturbed. This enables the expression of the drug marker, facilitating selection, while concurrently ensuring that RNA splicing remains unaffected, thus preserving the unaltered function of the gene in question. Upon the need for marker elimination, TnpA is engaged. Acting on the exact boundaries used for RNA splicing, it guarantees a precise, scarless excision, while preserving the flanking sequences intact during IStron integration. Moreover, if the element is inserted using HDR, the mutations resulting from the IStron incorporation can be stably integrated into these flanking sequences, providing a platform for modifying essential genes with selection capabilities.

[0336] The IS element may be characterized by the encoding of TnpB, which may be in association with TnpA (Y), TnpA(S), or independently without either of these TnpA variants. Additionally, a predetermined gene of interest may be embedded within the confines of the said IS element. Integral to the structure of the IS element is the ωRNA sequence, strategically located at its right end, designed such that it autonomously derives its guide sequence from its adjacent genomic environment.

[0337] The IS element can be seamlessly integrated into a wide spectrum of heterologous genomes, encompassing, but not limited to, bacteria, fungi, insects, and mammals, employing conventional genome editing techniques. Once integrated, the IS element adopts the role of an adaptive ‘gene drive’. This process is aided by the TnpB or IscB, which, in complex with ωRNA, utilize its intrinsic ability to initiate homologous recombination. This targets native sequences on either sister or homologous chromosomes, particularly those without the IS element.

[0338] Should TnpA orchestrate the relocation of the IS element within a different genomic locale, TnpB is equipped to spontaneously adapt and secure a novel guide for the ωRNA, ensuring its sustained function in the new setting. This mechanism stands in contrast to the established Cas9-centric gene drive methodologies which necessitate a statically pre-defined sgRNA for locus-specific targeting. Such traditional sgRNAs lack the flexibility to adjust if their corresponding element relocates. In contrast, the dynamic nature of TnpB/IscB-centric gene drives equips them with the adaptability to align with the immediate changes in their genomic surroundings.

TABLE 1

| Nuclease | NCBI Accession # | Protein Sequence | SEQ ID NO |
|---|---|---|---|
| GstTnpB1 | WP_160268933.1 | MANKAYQFRLYPTKEQEQLLAKTFGCVRFVYNKMLEERIQMFE | 1 |
| (encoded | | KFKDDQESLKQQTCPTPAKYKKEFPWLKEVDSLALANAQLNLQ | |
| by | | KAFQHFFSGRAGFPKFKNRKAKQSYTTNMVNGNIKLSDGYIKLP | |
| ISGst1) | | KLKWIKLKQHREIPAHHIIKSCTITKTKTGKYYISILTEYEHQPAP | |
| | | KEVQTVVGLDFSMSTLYVDSEGKRANYPRFYRKALETLAKEQR | |
| | | KLSRKKKGSNRWHKQRLKVAKLHEKIANQRKDFLHKESHKLA | |
| | | KRYDCVVIEDLNMKGMSQALHFGQGVHDNGWGMFTTFLQYK | |
| | | LAEQGKKLIKIDKWFPSSKTCSCCGRVKESLSLSERTFRCECRFE | |
| | | SDRDVNAAINIKHEGMKRLAIV | |
| GstTnpB2 | WP_047817673.1 | MYFCIKQQLNGLTKEEYLTLRELCHIAKNMYNVGLYNVRQYYF | 2 |
| (encoded | | EHKEFLNYEKNYHLAKTNENYKLLNSNMAQQILKKVNEAFKSF | |
| by | | FGLISLAKQGKYDHKAISIPKYLKKDGFHSLIIGQIRIDGNKFTIPY | |
| ISGst2) | | SRLFKKTHKPITITIPPVLLDKKIKQIEIIPKHHARFFEIQYKYEMPE | |
| | | DQRELNDQKALAIDLGLNNLATCVTSDGRSFIIDGRRLKSINQWF | |
| | | NKENARLQSIKDKQKIKGTTRKQALLAMNRNNKVNDYINKTCR | |
| | | YIINYCIENQIGKLVIGYAETWQRNMNLGKKTNQNFVNIPLGNIK | |
| | | EKLEYLCEFYGIEFLKQEESYTSQASFFDGDEIPEYNADNPKEYK | |
| | | FSGKRIKRGLYRTKSGKLINADVNGALNILKKSKAVDLSVLCSS | |
| | | GEVDTPQRIRIA | |
| GstTnpB3 | WP_011231306.1 | MYRTLKTRFRAKKEVIQKLFECNRISAEVWNECLRLAKEHHLET | 3 |
| (encoded | | GKWITKTELQKATKGRFSIHSQSIQAVVHKYIFARDGAKEARKK | |
| by | | GEKIKYPYKKKKHFNTKWAKDGFVLHEDGTLELSLGIWNRKRQ | |
| ISGst3) | | SPLVVKIDKEKLPNGKVKEIELVYDRGLWLCLSYEDGKKPKENP | |
| | | CKNRVAIDPGEIHTIAAICENGESLIITGRKIRSIHRLRNKKLKELQ | |
| | | KLMSRCKKGSKQWKKYNRAKQYVLSKSEAQLKDALHKTTRQF | |
| | | VRWCLENQVKEVVIGDIEGIQRNTKKKRNKKTNQKLSNWSFGK | |
| | | LFDYLKYKLNAEGIQIEKKDESYTSQTCPVCGKKNKSSSRNYTC | |
| | | QCGYKRHRDIHGAMNLFAKVYYGEIRPLEFTVKPFTYRRIA | |
| GstTnpB4 | WP_011229875.1 | MDMTLTAKIKIYPTAEQAEVLKATLSAYRQACNAVSVVIFDTKV | 4 |
| (encoded | | LAQAKLHDMTYRLLRSNYALRSQMAQSVIKTVIARYRSLKSNG | |
| by | | HEWTLVRFKKPEYDLVWNRDYSIVQGLFSVNTLEGRIKVSFEPK | |
| ISGst4) | | GMEPYFDGSWTFGTAKLVYKHNKFFLHIPMTKTIPTVDEHNIRQ | |
| | | VVGVDVGVNFLAVAYDSQGKTIFFNGRKIKHMRAKYKRMRKT | |
| | | LQQKGTASARRKLKTIGQRENRWMTDVNHAVTKALVRQYGER | |
| | | TLFVLEDLTGIREKTERVRIHDRYETVSWAFYQFRQMLEYKARL | |
| | | HGSKVIVVAPHYTSLTCPKCGHTEKANRKKRTHTFCCRTCGYTS | |
| | | NDDRIGAMNLQRKGIEYIVEGTTQA | |
| GstIscB | WP_223812651.1 | MYIINKHGKPLMPCSPRKARLLLKQKKAKVVRRTPFTIQLLYGS | 5 |
| (encoded | | SGYKQPVSLGVDMGTRHVGISATTKKDVLFEAEAQLRTDIVELL | |
| by | | AIRRQFRRSRRNRKTRYREARFLNRRKPEGWLPPSIQHKINSHIK | |
| ISGst5) | | LIDLVHNILPVTSVTIEVAAFDTQKLKNLNIRGVEYQQGEQMGF | |
| | | WNVREYVLYRDNHTCQYCKGKKKDPVLQVHHIESRKTGGDSP | |
| | | DNLITLCKTCHHEIHEKGLEHIFQRKRPPMRDASQMTAMRWAM | |
| | | FSRIREKYSHANITYGYITKCIRIANGLSKSHMVDARCISGNPLAK | |
| | | PSGTVYLLKFVRKNNRQLHKATILKGGKRKSNKAPRFVKGFQLF | |
| | | DKVVYERKECFIFGRRSSGYFDLRLLDGTKVHASASWKKLKRV | |
| | | EHASTLLIERRKGDSSPTFALA | |

TABLE 2

| | | Guide RNA sequence, 5′→3′ |
|---|---|---|
| | | (scaffold sequence as shown; |
| Nuclease | Protein amino acid sequence | guide region shown as N's) |
| GstTnpB1 | MVANKAYQFRLYPTKEQEQLLAKTFGCVRFV | GGAUGUCACAAGCCCUCCAUUUCGGUCAAGG |
| (ISGst4) | YNKMLEERIQLFEKFKDDQESLKQQTCPTPAK | CGUUCAUGACAACGGCUGGGGCAUGUUCACC |
| | YKKEFPWLKEVDSLALANAQLNLQKAFQHFF | ACUUUCCUUCAGUACAAGCUGGCCGAACAGG |
| | SGRAGFPKFKNRKAKQSYTTNMVNGNIKLSD | GGAAGAAGCUGAUCAAAAUCGACAAAUGGUU |
| | GYIKLPKLKWIKFKQHREIPAHHIIKSCTITKT | CCCCUCGUCCAAAACGUGUUCGUGCUGCGGU |
| | KTGKYYISILTEYEHQPALKEVQTVVGLDFSM | CGAGUCAAGGAGUCUCUAUCGCUUUCUGAAC |
| | STLYVDSEGKRANYPRFYRKALETLAKEQRK | GGACAUUCCGCUGUGAAUGUGGAUUCGAGAG |
| | LSRKKKGSNRWHKQRLKVAKLHEKMANQR | CGACAGGGACGUCAAUGCGGCCAUCAAUAUC |
| | KDFLHKESHKLAKRYDCVVIEDLNMKGMSQ | AAACAUGAGGGCAUGAAACGAUUGGCGAUCG |
| | ALHFGQGVHDNGWGMFTTFLQYKLAEQGKK | UCUAAUUUGUCCUCGAACCGUGGGGCACACG |
| | LIKIDKWFPSSKTCSCCGRVKESLSLSERTFRC | GGGAUCGCUCGGUCAACUUCCCAUCAUGAGA |
| | ECGFESDRDVNAAINIKHEGMKRLAIV (SEQ | UGGGAUUACCCGAGAAGCCCCCACCUCUAAG |
| | ID NO: 6) | CGAAGCGUAGGUGGUGGGAGUAUGUCACNNN |
| | | NNNNNNNNNNNNNNNNNNNNNNNNNNNNNN |
| | | NNNNNNN (SEQ ID NO: 12) |
| GstTnpB3 | MGYFCIKQQLNGLTKEEYLTLRELCHIAKNM | UUAAGCGCGGCUUGUAUCGAACAAAGUCUGG |
| (ISGst1) | YNVGLYNVRQYYFEHKEFLNYEKNYHLAKT | CAAACUAAUUAAUGCUGAUGUCAAUGGCGCA |
| | NENYKLLNSNMAQQILKKVNEAFKSFFGLISL | UUAAACAUCUUAAAGAAAAGUAAAGCUGUAG |
| | AKQGKYDHKAISIPKYLKKDGFHSLIIGQIRID | ACCUGAGUGUCUUAUGCUCUAGCGGCGAAGU |
| | GNKFTIPYSRLFKKTHKPITITIPPVLLDKKIKQI | GGACACGCCUCAAAGAAUAAGGAUUGCUUGA |
| | EIIPKHHARFFEIQYKYEMPEDQRELNDQKAL | AGCAGUCAAACUUCUUUGGAAGCCCCCACUU |
| | AIDLGLNNLATCVTSDGRSFIIDGRRLKSINQW | CAAAUUUUCGCUAGAAAAUUAAGUGGGGGUA |
| | FNKENARLQSIKDKQKIKGTTRKQALLAMNR | GUUCACNNNNNNNNNNNNNNNNNNNNNNNNN |
| | NNKVNDYINKTCRYIINYCIENQIGKLVIGYAE | NNNNNNNNNNNNNNN (SEQ ID NO: 13) |
| | TWQRNMNLGKKTNQNFVNIPLGNIKEKLEYL | |
| | CEFYGIEFLKQEESYTSQASFFDGDEIPEYNAD | |
| | NPKEYKFSGKRIKRGLYRTKSGKLINADVNG | |
| | ALNILKKSKAVDLSVLCSSGEVDTPQRIRIA | |
| | (SEQ ID NO: 7) | |
| GstTnpB4 | MGYRTLKTRFRAKKEVIQKLFECNRISAEVW | UUUACGGUCAAACCGUUUACGUAUCGACGGA |
| (ISGst3) | NECLRLAKEHHLETGKWITKTELQKATKGRF | UUGCUUAGGUAUGAAGUCGUAGAUGGCGAGU |
| | SIHSQSIQAVVHKYIFARDGAKEARKKGEKIK | UCCCGCCCUUGAGUAUCAUGGAUACUCAUGU |
| | YPYKKKKHFNTKWAKDGFVLHEDGTLELSL | UGCCUGUGGCUCCCAACGGGACGGGUGCCAG |
| | GIWNRKRQSPLVVKIDKEKLPNGKVKEIELVY | GUGUUGCCUGCAGAUAGGCUGCCAACCAGCC |
| | DRGLWLCLSYEDGKKPKENPCKNRVAIDPGE | UAUCAUGCAUCCACCUCCGAAGGGGAAACAG |
| | IHTIAAICENGESLIITGRKIRSIHRLRNKKLKEL | GAAACCCCCACUUCGAUAAGUGGGGGAGGUU |
| | QKLMSRCKKGSKQWKKYNRAKQYVLSKSEA | CAUNNNNNNNNNNNNNNNNNNNNNNNNNNN |
| | QLKDALHKTTRQFVRWCLENQVKEVVIGDIE | NNNNNNNNNNNNN (SEQ ID NO: 14) |
| | GIQRNTKKKRNKKTNQKLSNWSFGKLFDYLK | |
| | YKLNAEGIQIEKKDESYTSQTCPVCGKKNKSS | |
| | SRNYTCQCGYKRHRDIHGAMNLFAKVYYGEI | |
| | RPLEFTVKPFTYRRIA (SEQ ID NO: 8) | |
| GstTnpB5 | MDMTLTAKIKIYPTAEQAEVLKATLSAYRQA | UAUACCUCAAACGAUGACCGCAUUGGUGCUA |
| (ISGst5) | CNAVSVVIFDTKVLAQAKLHDMTYRLLRSNY | UGAACCUUCAACGAAAAGGAAUAGAGUACAU |
| | ALRSQMAQSVIKTVIARYRSLKSNGHEWTLV | CGUUGAAGGAACGACACAGGCAUGACCUGCG |
| | RFKKPEYDLVWNRDYSIVQGLFSVNTLEGRIK | UCGUUGGGUAGUUGUCAACCUGCCCCCUGAU |
| | VSFEPKGMEPYFDGSWTFGTAKLVYKHNKFF | GCAACCCCAAGUCAAGGAAGGAGGACGAAGU |
| | LHIPMTKTIPTVDEHNIRQVVGVDVGVNFLAV | CCGCUCGCACUUCUGGGGAGUUGCAAGCCCC |
| | AYDSQGKTIFFNGRKIKHMRAKYKRMRKTLQ | CACUUCAAGCGUUAGCUAAGUGGGGGUAGUU |
| | QKGTASARRKLKTIGQRENRWMTDVNHAVT | GACNNNNNNNNNNNNNNNNN |
| | KALVRQYGERTLFVLEDLTGIREKTERVRIHD | (SEQ ID NO: 15) |
| | RYETVSWAFYQFRQMLEYKARLHGSKVIVV | |
| | APHYTSLTCPKCGHTEKANRKKRTHTFCCRT | |
| | CGYTSNDDRIGAMNLQRKGIEYIVEGTTQA | |
| | (SEQ ID NO: 9) | |
| GstIscB1 | MGFVYIINKHGKPLMPCSPRKARLLLKQKKA | NNNNNNNNNNNNNNNNNNNNNNNNNNNNNN |
| (ISGst2) | KVVRRTPFTIQLLYGSSGYKQPVSLGVDMGT | NNNNNNNNNNGUCAACUCCCCACCACUUAAA |
| | RHVGISATTKKDVLFEAEAQLRTDIVELLAIR | GCCUAACGGCUUUUGAAGUGGGGGCUUGGCA |
| | RQFRRSRRNRKTRYREARFLNRRKPEGWLPP | AGCCCUAGUUGACUACCCUCAGCCAUUCAAU |
| | SIQHKINSHIKLIDLVHNILPVTSVTIEVAAFDT | GGCUACGUUGGAAGGGUCAUGACACUUACGG |
| | QKLKNLNIRGVEYQQGEQMGFWNVREYVLY | AUGCUCCUCCAGUCCGUAACCCUGUCGCAGA |
| | RDNHTCQYCKGKKKDPVLQVHHIESRKTGG | UGGUUAAAAGCUCUGAUGGGUAGGAGCGGUG |
| | DSPDNLITLCKTCHHEIHEKGLEHIFQRKRPPM | CUGUCUGCCGAACAAGCCCUUCCAACAUUGG |
| | RDASQMTAMRWAMFSRIREKYSHANITYGYI | GGAGGAGGAACUCACUCCUGAAAGGAGGUAC |
| | TKCIRIANGLSKSHMVDARCISGNPLAKPSGT | ACGUCUUGUUCGUGUACAUUAUCAAUAAGCA |
| | VYLLKFVRKNNRQLHKATILKGGKRKSNKAP | UGGAAAACCACUC (SEQ ID NO: 16) |
| | RFVKGFQLFDKVVYERKECFIFGRRSSGYFDL | |
| | RLLDGTKVHASASWKKLKRVEHASTLLIERR | |
| | KGDSSPTFALA (SEQ ID NO: 10) | |
| GstTnpA | MKLDNNNHSVFLLYYHLVLVVKYRRQVIDD | |
| (IsGst4) | TISDYAKDMFVRLGKNYNISLVEWNHDMDH | |
| or | VHILFKAHPNSELSKFINAYKSASSRLIKKHFP | |
| GstTnpA | QVKRKLWKEYFWSRSFCLLTTGGAPIEVIKK | |
| (encoded | YIENQGMK (SEQ ID NO: 11) | |
| by | | |
| ISGst1) | | |

TABLE 3

| | | SEQ ID |
|---|---|---|
| Description | Sequence | NO: |
| CboTnpB | MGIVAIKIKLKPTKEQEVLFWKSAGVARWSYNYFLSESERHYQEYLEGKQDKKTIKESEV | 17 |
| | RKYINNVLKKTTHTWLEEVGSNVMKQAVKDADIARKRWFDGVANKPKFKSKRKSKVSF | |
| | YVNYESLKRTNNGFRGEKIGVVKTYQALPKLKKGEKYSNPRISFDGMNWFISIGYNNEFK | |
| | AVKLTDVSLGIDVGIKELAVCSDGQFKKNINKTKRVRFLEKKLKREQRKISHKLEANIKSY | |
| | DKNRKPIYKRPLRDMKNIQKQNRIIRNLYKKLENIRTNYLHQCSNEIVKTKPSRIVMETLNI | |
| | KGMMKNKHLSKAIANQKLYEFKRQIQYKCKKYGIKFVEADKWYPSSKTCSCCGQVKSDL | |
| | KLKDRLYVCNCGLKMDRDLNASINLANYQIQSA | |
| CboTnpB | MGIVAIKIKLKPTKEQEVLFWKSAGVARWSYNYFLSESERHYQEYLEGKQDKKTIKESEV | 18 |
| (D190A) | RKYINNVLKKTTHTWLEEVGSNVMKQAVKDADIARKRWFDGVANKPKFKSKRKSKVSF | |
| | YVNYESLKRTNNGFRGEKIGVVKTYQALPKLKKGEKYSNPRISFDGMNWFISIGYNNEFK | |
| | AVKLTDVSLGIAVGIKELAVCSDGQFKKNINKTKRVRFLEKKLKREQRKISHKLEANIKSY | |
| | DKNRKPIYKRPLRDMKNIQKQNRIIRNLYKKLENIRTNYLHQCSNEIVKTKPSRIVMETLNI | |
| | KGMMKNKHLSKAIANQKLYEFKRQIQYKCKKYGIKFVEADKWYPSSKTCSCCGQVKSDL | |
| | KLKDRLYVCNCGLKMDRDLNASINLANYQIQSA | |
| ωRNA | aauuaccaaauucaaagugcuuaaccuaaacuaagcuuugaauauguacguaacgauacuacg | 19 |
| (native | gaauuuaagccuguuaagagucauaucaaaugguaguagcuuuggcaaacccagauucguug | |
| sequence | aagcaggaagacacaagacgaaaaucauaagacauaagucgugucauaguauaaaugucuaca | |
| guide) | uuuaaauagaaauguauauauuuuucguaucgguugugaauuuuuagccaauaaauuuaaugg | |
| | ugaaaaagg | |
| ωRNA | aauuaccaaauucaaagugcuuaaccuaaacuaagcuuugaauauguacguaacgauacuac | 20 |
| (library | ggaauuuaagccuguuaagagucauaucaaaugguaguagcuuuggcaaacccagauucguug | |
| targeting | aagcaggaagacacaagacgaaaaucauaagacauaagucgugucauaguauaaaugucuaca | |
| guide) | uuuaaauagaaauguauauauuuuucguaucgggacaagugguucaccaugcguugcuuuaug | |
| | guaugauag | |
| CboTnpA | MELMSIGKFAKRVGVNVVTLRRMEAKGEFLPAHVSSGGTRYYSTDQLKYFGKERNAHKL | 21 |
| | VVGYCRVSTPSQKDDLENQVNNVKSYMIAKGYQFEIIKDIGSGINYKKKGLKELIDKINNQ | |
| | EVSKVVILYKDRLIRFGFELIEYLCQINNVELEIIDHSEKSKEEELTDDLIQIITVFANRLYGQ | |
| | RSKKTKRLIEEVKNNDSSN | |
| CboTnpB | MIVAIKIKLKPTKEQEVLFWKSAGVARWSYNYFLSESERHYQEYLEGKQDKKTIKESEVR | 22 |
| | KYINNVLKKTTHTWLEEVGSNVMKQAVKDADIARKRWFDGVANKPKFKSKRKSKVSFY | |
| | VNYESLKRTNNGFRGEKIGVVKTYQALPKLKKGEKYSNPRISFDGMNWFISIGYNNEFKA | |
| | VKLTDVSLGIDVGIKELAVCSDGQFKKNINKTKRVRFLEKKLKREQRKISHKLEANIKSYD | |
| | KNRKPIYKRPLRDMKNIQKQNRIIRNLYKKLENIRTNYLHQCSNEIVKTKPSRIVMETLNIK | |
| | GMMKNKHLSKAIANQKLYEFKRQIQYKCKKYGIKFVEADKWYPSSKTCSCCGQVKSDLK | |
| | LKDRLYVCNCGLKMDRDLNASINLANYQIQSA | |
| CseTnpB1 | MGTIIKNVKQYSYILDTEMLNELKFIANQYKNVKNYIYSRYSGINSIPLLSKERQIRNEWVK | 23 |
| | SEFAKQWKLPARYWKLALTEAMGNIKSKWFNIKSKIKEQVKVNENLSDEDKHYINYIVKF | |
| | NSYYHKVLNYIGFDIPKIFKKKNLNFKYLNNLIRRYTRKYKGHIPYSKIGKTFSIDTGLYSY | |
| | KNNCINITSTKKGKRLSIKLTDSNKYNRTMIVKIIDNKIVVNCPLKIKTRKNKNTNIIGIDKG | |
| | YRYLFAVSSDKFYGENLNNYLSKETERLNKVNAQRNRFWALYNQYLDKGYIKKANKIKE | |
| | NNLGKVKYNHNKLKHDQTVKSYINYSLNQLIKEEKPKEIVMENLDFVNWNDKYPKIVKC | |
| | KLSRWIKGYIRERVEYKCDFYSIKYTYINPAYTSKVCSVCGSFGKRDGDIFICPKCNKFHAD | |
| | INASKNILNRKYDNDITLYTNYKKVKDILEKRIKVS | |
| CseTnpB2 | MIIATKIKLKPTNEQEILFWKSAGVARWSYNYFLAESENYYSQYNKTLKEGEVRKHINNV | 24 |
| | LKKTTHTWLSEVGSNVMKQAVKDANLARKRWFEGLSSKPKFKSRRKSKISFYVNYESLK | |
| | VVNGGFRGEKIGFIKTYQPLPKLKKGEKYSNPRISFDGRSWFLSVGYEKEFEAIELTGKSLG | |
| | IDVGIKELAVCSDGEFKKNINKTKKVKNLKRKLRREQRKVSRKIEANIKSYDKNRRPIYKT | |
| | PLRDMKNIQKQNQIIRNLYKKLTDIRTNHLHQCTSEIVKTKPSRIVMETLNIKGMMKNKHL | |
| | SKAIQEQNLYEFKRQIKYKCEIYGIEFVEADKWYPSSKTCSCCGAIKKDLKLKDRTYVCPC | |
| | GLKLDRDLNASINLANYSIQSA | |
| CseTnpA1 | MELMSIGKFAKKVGVNVVTLRRMEKKGELLPAHVSSGGTRYYSIEQLSYFGKATNTNKL | 25 |
| | VIGYCRVSTPSQKDDLVNQVNNVKSYMIAKGYQFEIITDIGSGINYKKKGLKQLINKINNR | |
| | EISKVVILYKDRLVRFGYELIEYMCEINGIELEIIDHSEKSKEEELTDDLIQIITVFANRLYGQ | |
| | RSKKTKKLIDEVKNNDNSN | |

TABLE 4
wRNA sequences

| | | Protein | | |
|---|---|---|---|---|
| | | SEQ ID | Target | Guide |
| Protein | wRNA sequence | NO | sequence | origin |
| CboTnpB | UAUGUACGUAACGAUACUACGGAAUUUAAGCCUGUUA | 22 | TGGGNNNN | Universal |
| | AGAGUCAUAUCAAAUGGUAGUAGCUUUGGCAAACCCA | | NNNNNNNN | guide |
| | GAUUCGUUGAAGCAGGAAGACACAAGACGAAAAUCAU | | NNNNNN | |
| | AAGACAUAAGUCGUGUCAUAGUAUAAAUGUCUACAUU | | | |
| | UAAAUAGAAAUGUAUAUAUUUUUCGUAUCGGNNNNNN | | | |
| | NNNNNNNNNNNN (SEQ ID NO: 26) | | | |
| CboTnpB | UAUGUACGUAACGAUACUACGGAAUUUAAGCCUGUUA | 22 | TGGGTTGTG | Native |
| | AGAGUCAUAUCAAAUGGUAGUAGCUUUGGCAAACCCA | | AATTTTTAG | guide |
| | GAUUCGUUGAAGCAGGAAGACACAAGACGAAAAUCAU | | CCAA (SEQ | |
| | AAGACAUAAGUCGUGUCAUAGUAUAAAUGUCUACAUU | | ID NO: 202) | |
| | UAAAUAGAAAUGUAUAUAUUUUUCGUAUCGGUUGUGA | | | |
| | AUUUUUAGCCAA (SEQ ID NO: 27) | | | |
| CseTnpB2 | CUAGGUUCUGAAUAUGUACGUAACGAUACUACGGAAU | 24 | TGGGNNNN | Universal |
| | UCAAGCCUGUGGAGGGUUAUAACAAAUGAAAGUAGUA | | NNNNNNNN | guide |
| | UGUGAUUUAUCACUACAAAAUCAGAUUCGUUGAAACA | | NNNNNN | |
| | GGAAGAUACAAAAUGAAAGCCUUAUGGUAUAAGUUGU | | | |
| | AUCACAGUAGAAAUGUCAACAUUAUUAUAAUAAUGUA | | | |
| | UAUAUUUUUCGUAUCGGNNNNNNNNNNNNNNNNNN | | | |
| | (SEQ ID NO: 28) | | | |
| CseTnpB2 | CUAGGUUCUGAAUAUGUACGUAACGAUACUACGGAAU | 24 | TGGGATTCA | Native |
| | UCAAGCCUGUGGAGGGUUAUAACAAAUGAAAGUAGUA | | TGATTTCAT | guide |
| | UGUGAUUUAUCACUACAAAAUCAGAUUCGUUGAAACA | | TAGG (SEQ | |
| | GGAAGAUACAAAAUGAAAGCCUUAUGGUAUAAGUUGU | | ID NO: 203) | |
| | AUCACAGUAGAAAUGUCAACAUUAUUAUAAUAAUGUA | | | |
| | UAUAUUUUUCGUAUCGGAUUCAUGAUUUCAUUAGG | | | |
| | (SEQ ID NO: 29) | | | |

TABLE 5
Protein Sequences and wRNA sequences

| | | Protein | | wRNA |
|---|---|---|---|---|
| | | SEQ ID | | SEQ ID |
| Protein | Protein amino acid sequence | NO | wRNA sequence | NO |
| CseTnpB3 | VILAKKVRLYPTKEQEQKLWQSVGTARFIYNW | 30 | AGAUAAUGUUAAUAUG | 51 |
| | TLAKQQENYKNGGKFISDNVLRKEITQLKKTEL | | UAGGAUUCGUUGUAUC | |
| | NWLNEVSNNVAKQAVKDGCNAYKRFFNGLSD | | CGAAUUUAAGCCUUUG | |
| | KPRFKSRRKCKPSFYNDTSKLKIKDNVVLIEKV | | GACUGUCAUAUCAAAU | |
| | GWITIRKNSIPMNCKYTNPRISFDGKYWFIAVGI | | GAGAGUAGCAAAUGAA | |
| | EKEKLLVELTDESIGIDVGVKDLAICSNRMTFKN | | UUUAUUCAUUGCAAAA | |
| | INKTKEVKRLKKVLKRKQRKISRKYEINKIESEV | | UCAGACAGGGUGAAUA | |
| | KSRCQFKKTNNIIKLEKEIRLLHRRLANIRSNHIH | | AGGAAUUAAACAAGAU | |
| | QATNMIVRTKPSRVVMETLNIKNMMKNRHLSK | | UUAUAGAUUUUUAUAA | |
| | AIAEQSLYDFKVKMKYKCAIYGIEFVEADKWFP | | AUUUUUGGCAACGGUG | |
| | SSKTCSKCGAIKKDLKLKDRVYQCSCGLKIDRD | | AUAGGGAUGUUUAGUG | |
| | FNASINLSRYKLA | | (SEQ ID NO: 51) | |
| CseTnpB4 | VILAKKVRLYPTKEQEQKLWQSVGTARFIYNW | 31 | GAGGUGUACCAUGCGU | 52 |
| | TLAKQQENYKNGGKFISDNVLRKELTILKKTEL | | UGUAUGGGAAGUUAAG | |
| | NWLNEVSNNVAKQAVKDGCNAYKSFFKGLSD | | CCCUUGGAGUGUUAUA | |
| | KPRFKSRRKSKPSFYNDTLKLKIKDNVVLIEKV | | UCAAACCAAAGUAGCU | |
| | GWITIRKNSIPMNCKYTNPRISFDGKYWFIAVGI | | CUUAGCAAAAUGGGAC | |
| | EKEKLLVELTDESIGIDVGVKDLAICSNGMSFKN | | ACGUUGAAUAGGGAAU | |
| | INKTKVIKKLKKTLKRKQRQCSRKYEKNKKGR | | UAAACAAGCUUUAUAA | |
| | EFVKTKNIAKLERQIRLLHRRLANIRDNHLHQA | | AGUUUUAUAAUGUUUU | |
| | TNKIVKTKPSRVVMETLNIKGIMKNKHLSKAIA | | GGCAACGGGAUAAGAA | |
| | EQCLYEFKRQMQYKCELYGIEFVEADKWYPSS | | UAACAUGAGA | |
| | KTCSECGHVKTKLSLSERTYICEECGCVIDRDY | | (SEQ ID NO: 52) | |
| | NASINLSRYSA | | | |
| CseTnpB5 | LKRAYKIEIKPTLAQKIKIHQTIGISRFIYNFYLAH | 32 | UAGAUACUUAUAUAUG | 53 |
| | NKEIYQKEKRFVSGMDFSKWLNNEYIPKNQDE | | UACCGUUGGCUAGAUG | |
| | KWIKEVSSKATKQAIMNGEKAFKKFFKGESGFP | | GGAAUUUAAGCCUGUG | |
| | KFKKKKNKDVKAYFPKNNKTDWTIERHRVKIP | | GAGUGCUAUAUAAACU | |
| | TIGWMRLKEYGYIPTNSIVKSGTVSQKADRYYV | | AAAGUAGCUUCGGCAA | |
| | SILVEEDIKPNDKPYSCGIGVDLGIKDTAICSNGI | | AAUGGAGUACAUUGAA | |
| | KFKNINKTSKVKKIETKLKREQRKLSRKYESLKI | | ACAGGAAAAAUCUCAA | |
| | RNKNNKEGATRQNIQKQVVKVQKIHQRLYNIR | | UAUGGGUAUUUUUGUC | |
| | NDYNNKIVSELVKIKPVFITIEDLAISNMIKNKHL | | CAUAUUUUGAGUAGCA | |
| | SKAVQKQKLYDLRNKLISKSHQNNIEIRQVSRW | | GAUGUAUUACCAAGUG | |
| | YPSSKLCNKCGGVKKDLKLSDRVYNCKCGYSF | | AAAU | |
| | DRDANASYNLRDAKEYKII | | (SEQ ID NO: 53) | |
| CseTnpB6 | LLRAYKIEIKPTLEQKIKIHQTIGISRFIYNFYLAH | 33 | AGAUACUUAUAUAUGU | 54 |
| | NKEIYQKEKRFVSGMDFSKWLNNEYIPNNQDK | | ACCGUUGGCUAAAUGG | |
| | KWIKEVSSKATKQAIMNGEKAFKKFFKGETSFP | | GAAUUUAAGCCUGUGG | |
| | KFKKKKNKDVKAYFPKNNKTDWTIERHRVKIP | | AGUGCUAUAUAAACCA | |
| | TIGWMRLKEYGYIPNNSIVKSGTVSQKSDRYYV | | AAGUAGCUUCGGCAAA | |
| | SILVEEDIKPNYKPYSCGIGIDLGIKDTAICSNGIK | | AUGGAGUACAUUGAAA | |
| | FKNINKMSKVKKIERKLKREQRKLSRKYESLKI | | CAGGAAAAAUCUCAAU | |
| | RNKNNKEGATRQNIQKQVVKVQKIHQRLYNIR | | AUGGGUAUUUUUGUCC | |
| | NDYNNKIVSELVKIKPVFITIEDLAISNMIKNKHL | | AUAUUUUGAGUAGCAG | |
| | SKAVQKQKLYDLRNKLISKSHQNNIEIRQVSRW | | UGUUGAAAAUGAAAAA | |
| | YPSSKLCNKCGSVKKDLKLSDRVYNCKCGYSF | | AGU | |
| | DRDANASYNLRDAKEYKII | | (SEQ ID NO: 54) | |
| CseTnpB7 | LKRAYKIEIKPTLAQKIKIHQTIGISRFIYNFYLAH | 34 | UAGAUACUUAUAUAUG | 55 |
| | NKEIYQKEKRFVSGMDFSKWLNNEYIPNNQDK | | UACCGUUGGCUAGAUG | |
| | KWIKEVSSKATKQAIMNGEKAFKKFFKGETSFP | | GGAAUUUAGGCCUGUG | |
| | KFKKKKNKDVKAYFPKNNKTDWTIERHRVKIP | | GAGUGCUAUAUAAACC | |
| | TIGWMRLKEYGYIPTNSIVKSGTVSQKSDRYYV | | AAAGUAGCUUCGGAAA | |
| | SILVEEDIKPNDKPYSCGIGIDLGIKDTAICSNGIK | | AAUGGAGUACAUUGAA | |
| | FKNINKTSKVKKIERKLKREQRKLSRRYESLKIR | | ACAGGAAAAAUCUCAA | |
| | NKNNKEGATRQNIQKQVVKVQKIHQRLYNIRN | | UAUGGGUAUUUUUGUC | |
| | DYNNKIVSELVKIKPVFITIEDLAISNMIKNKHLS | | CAUAUUUUGAGUAGCA | |
| | KAVQKQKLYDLRNKLISKSHQNNIEIRQVSRWY | | GUAAGUUUAAUGAAGA | |
| | PSSKLCNKCGSVKKDLKLSDRVYNCKCGYSFD | | AGAAA | |
| | RDANASYNLRDAKEYKII | | (SEQ ID NO: 55) | |
| CseTnpB8 | VILAKKVRLYPTKEQEQKLWQSVGTARFIYNW | 35 | AGAUAAUGUUAAUAUG | 56 |
| | TLVKQQENYKNGGKFISDNVLRKELTILKKTEL | | UAGGAUUCGUUGUAUC | |
| | NWLNEVSNNVAKQAVKDGCNAYKNFFKGLSD | | CGAAUUUAAGCCUUUG | |
| | KPRFKSRRKSKPSFYNDTSKLKIKDNVVLIEKVG | | GACUGUCAUAUCAAAU | |
| | WITIRKNSIPVNCKYTNPRISFDGKYWFIAVGIE | | GAGAGUAGCAAAUGAA | |
| | KEKLLVELTDESIGIDVGVKDLAICSNGMTFKNI | | UUUAUUCAUUGCAAAA | |
| | NKTKEVKRLKKVLKRKQRKISRKYEINKIESEV | | UCAGACAGGGUGAAUA | |
| | KSRCQFKKTNNIIKLEKEIRLLHRRLANIRSNHIH | | AGGAAUUAAACAAGAU | |
| | QATNMIVRTKPSRVVMETLNIKNMMKNRHLSK | | UUAUAUAUUUUUAUAG | |
| | AIAEQSLYDFKVKMKYKCAIYGIEFVEADKWFP | | AUUUUUGGCAACGGUG | |
| | SSKTCSKCGAIKKDLKLKDRVYQCSCGLKIDRD | | UUAAUAUUGUUUGAUU | |
| | FNASINLSRYKLA | | (SEQ ID NO: 56) | |
| CseTnpB9 | MKLSFKFRPNVSSKQLEIIEELSYHTTKLYNIINY | 36 | — | |
| | ALRENGFKNYYNIELEFKNNWHCDFLHSHTRQ | | | |
| | QMFKVLEQNWKSYFASIKDYEVNPSKYKGIPRR | | | |
| | PKFKNVDKNKNEIIFTNIAIRFQDGILKLSLSKAI | | | |
| | QRLFEVESLNFEVSNKLQSLIDWNSLQQARLTY | | | |
| | DKVQKCWCLIVIYNKLEKENNNSNIMAIDLGLD | | | |
| | NLATLTFKEGNETYIFCGKKLKSVNAYANKKIA | | | |
| | YLQSIEMQKCGSDKFKNTKEINRLRRYRNNYID | | | |
| | DYLHKVSKNIIDKAIEHEVKKIVIGKLKGIKQDM | | | |
| | NYNKSFVQIPIQRLAELIKYKAKLQGIEVKFKEE | | | |
| | SYTSGCSAFDLEPINKKYYDKTRRVVRGLFKSS | | | |
| | FGLVNSDINGSLNILRKEEKCIPQLVKTMRDKG | | | |
| | KCSRPLRIRVAC | | | |
| CseTnpB10 | LKRAYKMEIKPTLAQKIKIHQTIGISRFIYNFYLA | 37 | UAGAUACUUAUAUAUG | 57 |
| | HNKEIYQKEKRFVSGMDFSKWLNNEYIPNNQD | | UACCGUUGGCUAAAUG | |
| | KKWIKEVSSKATKQAIMNGEKAFKKFFKGEAG | | GGAAUUUAAGCCUGUG | |
| | FPKFKKKKNKDVKAYFPKNNKTDWTIERHRVK | | GAGUGCUAUAUAAACC | |
| | IPTIGWMRLKEYGYIPTNSIVKSGTVSQKADRY | | AAAGUAGCUUCGGCAA | |
| | YVSILVEEDIKSNDKPYSCGIGVDLGIKDTAICSN | | AAUGGAGUACAUUGAA | |
| | GIKFKNVNKTSKVKKIERKLKREQRKLSRKYES | | ACAGGAAAAAUCUCAA | |
| | FKIRNKNNKEGATRQNIQKQVVKVQKIHQRLY | | UAUGGGUAUUUUUGUC | |
| | NIRNDYNNKIVSELVKIKPVFITIEDLAISNMIKN | | CAUAUUUUGAGUAGCA | |
| | KHLSKAIQKQKLYDLKNKLISKSHQNNIEIRQVS | | GGAAAAAAUUAUGUAU | |
| | RWYPSSKLCNKCGSIKKDLKLSDRVYNCKCGY | | GAUGU | |
| | RFDRDANASYNLRDAKEYKII | | (SEQ ID NO: 57) | |
| CseTnpA2 | MKYYSIGEFATQIGKTIQTLRNWDKNGTLKPSH | 38 | — | |
| | ITAGGTRYYSQEQLNHFLGLKSEVQLSKKTIGY | | | |
| | CRVSSHKQKDDLARQIENVKTYMYAKGYQFEII | | | |
| | QDIGSGINYNKKGLNQLIDMITNSEVDKIVVLY | | | |
| | KDRLIRFGYELIENLCNKYGTTIEVIDNTEKSEE | | | |
| | QELVEDLIQIVTVFSCRLQGKRADKAKKMIKEL | | | |
| | LESDSSQES | | | |
| CseTnpA3 | VKYYSIGKFSKLIGRTTQTLRDWDKKGVLKPQH | 39 | — | |
| | VAPSGYRYYSQEQLNHFLGIKGIETKKVIGYCR | | | |
| | VSSHKQKDDLARQIENVKTYMYAKGYQFEIIQD | | | |
| | IGSGINYSKKGLNQLIDMITNSEVEKIVILYKDRL | | | |
| | LRFGFEIIENLCNKYGTTIEIIDNTEKTEEQELVE | | | |
| | DLIQIVTVFSCTLQGKRANKVNKMIKELLESDPS | | | |
| | QES | | | |
| CseTnpA4 | MKHITNYKPKDFAELLYVSVKTLQRWDREDIL | 40 | — | |
| | KAKRTPTNRRYYTYDQYLEFKGLKKEIERKIIIY | | | |
| | TRVSTNNQKDDLKNQIEFLKNFANVKGIIVDDV | | | |
| | ISDIGSGLNYNRKKWNKLLDECMENKIDSILITH | | | |
| | KDRFIRFGYNWFERFLVKFDVKIIVVNNKSFSPQ | | | |
| | EESVQDKISILHVFSCRIYGLRKYKKKIKEDEEIE | | | |
| | KSLQDRD | | | |
| CseTnpA5 | MKYYSIGEFATRIGKTIQTLRNWDKNGTLKPSHI | 41 | — | |
| | TAGGTRYYSQEQLNHFLGLKSEVQLSKKTIGYC | | | |
| | RVSSHKQKDDLPKQIENVKTYMYAKGYQFEIIQ | | | |
| | DIGSGINYNKKGLNQLIDMITNSEVDKIVVLYK | | | |
| | DRLIRFGYELIENLCNKYGTTIEVIDNTEKSEEQE | | | |
| | LVEDLIQIVNVFSCRLQGKRADKAKKMIKELLE | | | |
| | SDSSQES | | | |
| CdiTnpB1 | MIKTHRVKLNLTRTQFELVREKQMESANCWNY | 42 | — | |
| | IVNLSKEYYFEHKQWIKKNDIQKLIKGKYNLHS | | | |
| | QTIQAISDKFDANRKTISELRKKGNTKAKYPYK | | | |
| | TKKFYIIPFKASAINRNAKGNLKLSMSKGRYLEL | | | |
| | DFNVENIKTAEIVWRNGYYLYYTFDNELNGVV | | | |
| | AKGTNTVGVDLGEIHSIASVTNEGVGLILSNREG | | | |
| | RSIKQFRNKMYAYISKRLSKCKKGSRQSKKLW | | | |
| | RLKNKIRSKTDNQLMNLYHQTTRKFIDFCVEQK | | | |
| | VCEIVLGDIKGVEKDTKKKKRLNRVNRQKISQ | | | |
| | MEYGRIKDYIKYKAKEQGIEVKLVKENYTSQTC | | | |
| | PKCSKKHKPTGRTYSCTCGYETHRDIVGAWNIL | | | |
| | NKKHKYGLVDFRINHKQPINLKVSTV | | | |
| CdiTnpB2 | VIAVEKAYKFRMYPNKKQQELINKTFGCCRFV | 43 | — | |
| | YNKYLAKRIDVYKNDKETFTYKQCSSDLTNLK | | | |
| | KELKWLKEPDKFSLQNALKDLDNAYKKFFKEK | | | |
| | AGLPKFKSKKINRFSYKTNFTNGNIMYCGQHIK | | | |
| | LPKLGMVKIRDKQVPQGRILNATISKEPSGRYY | | | |
| | VSLCCTDVDIEVFENTNNQIGLDLGIKEFCISSCG | | | |
| | EFIENPKYLKKSLNKLAKLQRELSRKTIGSLNRN | | | |
| | KARLKVAGLQEHIANQRKDFLQKLSTKLIKEND | | | |
| | IICIEDLQVKNMIRNRKLSRLISDVSWSEFIRQLE | | | |
| | YKANWHGRQIVKVGKFFASSQICNKCGYKNEE | | | |
| | VKDLNIREWICPSCNETHDRDINASINILKEGLR | | | |
| | LITIQNK | | | |
| CdiTnpB3 | VIAVKKAYKFRMYPNKKQQELINKTFGCCRFV | 44 | — | |
| | YNKYLAKRIDVYKSDKETFTYKQCSSDLTNLK | | | |
| | KELKWLKEPDKFSLQNALKDLDNAYKKFFKEK | | | |
| | AGFPKFKSKKINRFSYKTNFTNGNIMYCGQYIK | | | |
| | LPKLGMVKIRDKQVPQGRILNATISKEPSGRYY | | | |
| | VSLCCTDVDIEVFENTNNHIGLDLGIKEFCISSCG | | | |
| | DFIENPKYLKKSLNKLAKLQRELSRKTIGSLNRN | | | |
| | KARLKVAGLQEHIANQRNDFLQKLSTKLIKEND | | | |
| | IICIEDLQVKNMIRNRKLSRLISDVSWSEFIRQLE | | | |
| | YKANWYGRQIVKVGKFFASSQICNKCGYKNEEI | | | |
| | KDLNIREWICPSCNETHDRDINASINILKEGLRLI | | | |
| | TIQNK | | | |
| CdiTnpB4 | VIAVKKAYKFRIYPNKKQQELINKTFGCCRFVY | 45 | — | |
| | NKYLAKRIDVYKNDKETFTYKQCSSDLTNLKK | | | |
| | ELNWLKEPDKFSLQNALKDLDNAYKKFFKEKA | | | |
| | GFPKFKSKKINRFSYKTNFTNGNIMYCGQHIKLP | | | |
| | KLGMVKVRDKQVPKGRILNATISKEPSGRYYVS | | | |
| | LCCTDVDIEVFENTNNHIGLDLGIKEFCISSCGEF | | | |
| | IENPKYLKKSLNKLAKLQRELSRKTIGSLNRNKT | | | |
| | RLKVARLQEHIANQRNDFLQKLSTKLIKENDIIC | | | |
| | IEDLQVKNMIRNRKLSRLISDVSWSEFIRQLEYK | | | |
| | ANWHGRQIVKVGKFFASSQICNKCGYKNEEVK | | | |
| | DLNIREWICPSCNETHDRDINASRNILKEGLRLIT | | | |
| | IQNK | | | |
| CdiTnpB5 | VAVVEKAYKFRMYPNKKQQELINKTFGCCRFV | 46 | — | |
| | YNKYLAKRIEVYKNNKETFTYKQCSSDLTNLK | | | |
| | KELKWLKEPDKFSLQNALKDLDNAYKKFFKEK | | | |
| | SGFPKFKSKKINRFSYKTNFTNGNIMYFSQHIKL | | | |
| | PKLGMVKIRDKQVPQGRILNATISKEPSGRYYV | | | |
| | SLCCTDVDIEAFENTNNQIGLDLGIKEFCISSCGD | | | |
| | FIENPKYLKKSLSKLAKLQRELSRKTIGSLNRNK | | | |
| | ARLKVARLQEHIANQRNDFLQKLSTKLIKENDII | | | |
| | CIEDLQVKNMIRNRKLSRLISDVSWSEFIRQLKY | | | |
| | KANWHGRQIVKVGKFFASSQICNKCGYKNEEV | | | |
| | KDLNVREWICPSCNETHDRDINASINILKEGLRL | | | |
| | ITIQNK | | | |
| CdiTnpB6 | VVVVEKAYKFRMYPNKKQQELINKTFGCCRFV | 47 | — | |
| | YNKYLAKRIDVYKNNKETFTYKQCSSDLTNLK | | | |
| | KELKWLKEPDKFSLQNALKDLDNAYKKFFKEK | | | |
| | TGFPKFKSKKINRFSYKTNFTNGNIMYCGQHIKL | | | |
| | PKLGMVKIRDKQVPQGRILNATISKEPSGRYYV | | | |
| | SLCCTDVDIEAFENTNNHIGLDLGIKEFCISSCGE | | | |
| | FIENPKYLKKSLNKLAKLQRELSRKTIGSLNRNK | | | |
| | ARLKVARLQEHIANQRKDFLQKLSTKLIKENDII | | | |
| | CIEDLQVKNMIKNHKLSRSISDVSWSEFIRQLEY | | | |
| | KANWHGRQIVKVGKFFASSQICNKCGYKNEEV | | | |
| | KNLNIREWICPSCNETHDRDINASINILKEGLRLI | | | |
| | TIQNK | | | |
| CdiTnpB7 | VIAVEKAYKFRMYPNKKQQELINKTFGCCRFV | 48 | — | |
| | YNKYLAKRIDVYKNDKETFTYKQCSSDLTNLK | | | |
| | KELNWLKEPDKFSLQNALKDLDNAYKKFFKEK | | | |
| | AGFPKFKSKKINRFSYKTNFTNGNIMYCGQHIK | | | |
| | LPKLGMVKIRDKQVPQGRILNATISKEPSGRYY | | | |
| | VSLCCTDVDIEAFENTNNQIGLDLGIKEFCISSCG | | | |
| | EFIENPKYLKKSLNKLAKLQRELSRKTIGSLNRN | | | |
| | KARLKVARFQEHIANQRNDFLQKLSTKLIKEND | | | |
| | IICIEDLQVKNMIRNRKLSRLISDVSWSEFIRQLE | | | |
| | YKANWYGRQIVKVGKFFASSQICNKCGYKNEE | | | |
| | VKDLNIREWICPSCNETHDRDINASINILKEGLR | | | |
| | LITIQNK | | | |
| CdiTnpB8 | VIVVEKAYKFRMYPNKKQQELINKTFGCCRFV | 49 | — | |
| | YNKYLAKRIDVYKNDKETFTYKQCSSDLTNLK | | | |
| | KELNWLKEPDKFSLQNALKDLDNAYKKFFKEK | | | |
| | AGFPKFKSKKINRFSYKTNFTNGNIMYCGQHIK | | | |
| | LPKLGMVKVRDKQVPKGRILNATISKEPSGRYY | | | |
| | VSLCCTDVDIEVFENTNNHIGLDLGIKEFCISSCG | | | |
| | EFIENPKYLKKSLNKLAKLQRELSRKTIGSLNRN | | | |
| | KTRLKVARLQEHIANQRNDFLQKLSTKLIKEND | | | |
| | IICIEDLQVKNMIRNRKLSRLISDVSWSEFIRQLE | | | |
| | YKANWHGRQIVKVGKFFASSQICNKCGYKNEE | | | |
| | VKDLNIREWICPSCNETHDRDINASRNILKEGLR | | | |
| | LITIQNK | | | |
| CdiTnpB9 | VIVVEKAYKFRMYPNKKQQELINKTFGCCRFV | 50 | — | |
| | YNKYLAKRIEVYKNDKETFTYKQCSSDLTNLK | | | |
| | KELKWLKEPDKFSLQNALKDLDNAYKKFFKEK | | | |
| | AGFPKFKSKKINRFSYKTNFTNGNIMYCGQHIK | | | |
| | LPKLGMVKIRDKQVPKGRILNATISKEPSGRYY | | | |
| | VSLCCTDVDIEAFENTNNQIGLDLGIKEFCISSCG | | | |
| | EFIENPKYLKKSLSKLAKLQRELSRKTIGSLNRN | | | |
| | KARLKVARLQEHIANQRNDFLQKLSTKLIKEND | | | |
| | IICIEDLQVKNMIRNRKLSRLISDVSWSEFIRQLK | | | |
| | YKANWHGRQIVKVGKFFASSQICNKCGYKNEE | | | |
| | VKDLNIREWICPSCNETHDRDINASINILKEGLR | | | |
| | LITIQNK | | | |

TABLE 6
Minimal IS elements for the CboIStron element

| | | | Sequence |
|---|---|---|---|
| | | | derived |
| Element | Nucleotide sequence | Sequence derived from LE | from RE |
| Minimal | TAATTAAACTGTTATAACAAATCTAAA | TAATTAAACTGTTATAACAAATCTA | GTATATAT |
| IS element | CAAAACTATACAAATATGTATAGAAAA | AACAAAACTATACAAATATGTATAG | TTTTCGTA |
| competent | ATAGATTTATAACAGGAAGCCCTGTGT | AAAAATAGATTTATAACAGGAAGCC | TCGG (SEQ |
| for | ATCATGTGAATGGTGCATACTCGGTGT | CTGTGTATCATGTGAATGGTGCATA | ID NO: 64) |
| efficient | TAATTGCTTTTAACTCCTAAAGCCTTAC | CTCGGTGTTAATTGCTTTTAACTCCT | |
| splicing | AACCAAAGCGAAGTTGGAAACGACAA | AAAGCCTTACAACCAAAGCGAAGTT | |
| | GCGTAACGGTGCGAAAGCTGAAAAAA | GGAAACGACAAGCGTAACGGTGCG | |
| | TAGTAAGGATGGCATAAGCTGAAATA | AAAGCTGAAAAAATAGTAAGGATG | |
| | AAATCCAATTAGGTTCTATAAAAGGGT | GCATAAGCTGAAATAAAATCCAATT | |
| | GGTCGTGACATATAGAAAACGTTGGGT | AGGTTCTATAAAAGGGTGGTCGTGA | |
| | GCTAAATGCTGTAATAATGGATGTTTA | CATATAGAAAACGTTGGGTGCTAAA | |
| | GCAGGGAAATTCCTAAGTCTTTTAAGA | TGCTGTAATAATGGATGTTTAGCAG | |
| | TATGGAAGACCTTCAACGACTATCTCC | GGAAATTCCTAAGTCTTTTAAGATA | |
| | TTGAGGGAGAGTAAAGCCACAAGCCA | TGGAAGACCTTCAACGACTATCTCC | |
| | ACGGTGGAAGAAAAATACCGCATCTCT | TTGAGGGAGAGTAAAGCCACAAGC | |
| | TTTGAGATGAAGATATAGTCTACGCTC | CAACGGTGGAAGAAAAATACCGCA | |
| | ATATGAAAGTATGAGAGGTCTACTCGT | TCTCTTTTGAGATGAAGATATAGTC | |
| | GAGAGAAAGACTGCTATAGGTGTTGCG | TACGCTCATATGAAAGTATGAGAGG | |
| | ACCTATAGTGAATAAGAAAAATATATA | TCTACTCGTGAGAGAAAGACTGCTA | |
| | CAAATATAAAAAATATTGACATATCTC | TAGGTGTTGCGACCTATAGTGAATA | |
| | TCTAAAAAGTGTAATATATTATTATAC | AGAAAAATATATACAAATATAAAA | |
| | TAAAGGGAGGTGAGTACGTATATATTT | AATATTGACATATCTCTCTAAAAAG | |
| | TTCGTATCGG (SEQ ID NO: 58) | TGTAATATATTATTATACTAAAGGG | |
| | | AGGTGAGTAC (SEQ ID NO: 61) | |
| Minimal | TAATTAAACTGTTATAACAAATCTAAA | TAATTAAACTGTTATAACAAATCTA | ATATTTTT |
| IS element | CAAAACTATACAAATATGTATAGAAAA | AACAAAACTATACAAATATGTATAG | CGTATCGG |
| competent | ATAGATTTATAACAGGAAGCCCTGTGT | AAAAATAGATTTATAACAGGAAGCC | (SEQ ID |
| for | ATCATGTGAATGGTGCATACTCGGTGT | CTGTGTATCATGTGAATGGTGCATA | NO: 65) |
| splicing | TAATTGCTTTTAACTCCTAAAGCCTTAC | CTCGGTGTTAATTGCTTTTAACTCCT | |
| | AACCAAAGCGAAGTTGGAAACGACAA | AAAGCCTTACAACCAAAGCGAAGTT | |
| | GCGTAACGGTGCGAAAGCTGAAAAAA | GGAAACGACAAGCGTAACGGTGCG | |
| | TAGTAAGGATGGCATAAGCTGAAATA | AAAGCTGAAAAAATAGTAAGGATG | |
| | AAATCCAATTAGGTTCTATAAAAGGGT | GCATAAGCTGAAATAAAATCCAATT | |
| | GGTCGTGACATATAGAAAACGTTGGGT | AGGTTCTATAAAAGGGTGGTCGTGA | |
| | GCTAAATGCTGTAATAATGGATGTTTA | CATATAGAAAACGTTGGGTGCTAAA | |
| | GCAGGGAAATTCCTAAGTCTTTTAAGA | TGCTGTAATAATGGATGTTTAGCAG | |
| | TATGGAAGACCTTCAACGACTATCTCC | GGAAATTCCTAAGTCTTTTAAGATA | |
| | TTGAGGGAGAGTAAAGCCACAAGCCA | TGGAAGACCTTCAACGACTATCTCC | |
| | ACGGTGGAAGAAAAATACCGCATCTCT | TTGAGGGAGAGTAAAGCCACAAGC | |
| | TTTGAGATGAAGATATAGTCTACGCTC | CAACGGTGGAAGAAAAATACCGCA | |
| | ATATGAAAGTATGAGAGGTCTACTCGT | TCTCTTTTGAGATGAAGATATAGTC | |
| | GAGAGAAAGACTGCTATAGGTGTTGCG | TACGCTCATATGAAAGTATGAGAGG | |
| | ACCTATAGTGAATAAGAAAAATATATA | TCTACTCGTGAGAGAAAGACTGCTA | |
| | CAAATATAAAAAATATTGACATATCTC | TAGGTGTTGCGACCTATAGTGAATA | |
| | TCTAAAAAGTGTAATATATTATTATAC | AGAAAAATATATACAAATATAAAA | |
| | TAAAGGGAGGTGAGTACATATTTTTCG | AATATTGACATATCTCTCTAAAAAG | |
| | TATCGG (SEQ ID NO: 59) | TGTAATATATTATTATACTAAAGGG | |
| | | AGGTGAGTAC (SEQ ID NO: 62) | |
| Minimal | TAATTAAACTGTTATAACAAATCTAAA | TAATTAAACTGTTATAACAAATCTA | AGTCGTGT |
| IS element | CAAAACTATACAAATATGTATAGAAAA | AACAAAACTATACAAATATGTATAG | CATAGTAT |
| competent | ATAGATATCCCAGCGGTCAAAACAGGC | AAAAATAGAT (SEQ ID NO: 63) | AAATGTCT |
| for | GGCAGTAAGGCGGTCGGGATAGTTTTC | | ACATTTAA |
| excision | TTGCGGCCCTAATCCGAGCCAGTTTAC | | ATAGAAAT |
| (with 800- | CCGCTCTGCTACCTGCGCCAGCTGGCA | | GTATATAT |
| bp cargo) | GTTCAGGCCAATCCGCGCCGGATGCGG | | TTTTCGTA |
| | TGTATCGCTCGCCACTTCAACATCAAC | | TCGG (SEQ |
| | GGTAATCGCCATTTGACCACTACCATC | | ID NO: 66) |
| | AATCCGGTAGGTTTTCCGGCTGATAAA | | |
| | TAAGGTTTTCCCCTGATGCTGCCACGC | | |
| | GTGAGCGGTCGTAATCAGCACCGCATC | | |
| | AGCAAGTGTATCTGCCGTGCACTGCAA | | |
| | CAACGCTGCTTCGGCCTGGTAATGGCC | | |
| | CGCCGCCTTCCAGCGTTCGACCCAGGC | | |
| | GTTAGGGTCAATGCGGGTCGCTTCACT | | |
| | TACGCCAATGTCGTTATCCAGCGGTGC | | |
| | ACGGGTGAACTGATCGCGCAGCGGCGT | | |
| | CAGCAGTTGTTTTTTATCGCCAATCCAC | | |
| | ATCTGTGAAAGAAAGCCTGACTGGCGG | | |
| | TTAAATTGCCAACGCTTATTACCCAGC | | |
| | TCGATGCAAAAATCCATTTCGCTGGTG | | |
| | GTCAGATGCGGGATGGCGTGGGACGC | | |
| | GGCGGGGAGCGTCACACTGAGGTTTTC | | |
| | CGCCAGACGCCACTGCTGCCAGGCGCT | | |
| | GATGTGCCCGGCTTCTGACCATGCGGT | | |
| | CGCGTTCGGTTGCACTACGCGTACTGT | | |
| | GAGCCAGAGTTGCCCGGCGCTCTCCGG | | |
| | CTGCGGTAGTTCAGGCAGTTCAATCAA | | |
| | CTGTTTACCTTGTGGAGCGACATCCAG | | |
| | AGGCACTTCACCGCTTGCCAGCGGCTT | | |
| | ACCATCCAGCGCCACCATCCAGTAGTC | | |
| | GTGTCATAGTATAAATGTCTACATTTA | | |
| | AATAGAAATGTATATATTTTTCGTATC | | |
| | GG (SEQ ID NO: 60) | | |

TABLE 7

| Nuclease | | | |
|---|---|---|---|
| | | Vector | |
| | | sequence | |
| | | SEQ ID NO | |
| | | (protein & | |
| | Vector ID, | RNA), E. | |
| | E. coli | coli | Target of the guide RNA in |
| | expression | expression | E. coli experiments (TAM in brackets) |
| GstTnpB1 | pSL4624 | 73 | [TTTAA]GCTGATCGAAAAGCATGAACTGCCTTCTGT |
| | | | GTACTGGGAA (SEQ ID NO: 79) |
| GstTnpB3 | pSL4369 | 74 | [TTTAT]GGACAAGTGGTTCACCATGCGTTGCTTTAT |
| | | | GGTATGATAG (SEQ ID NO: 80) |
| GstTnpB4 | pSL4672 | 75 | [TTTAA]CGGTCATTTTCCCGTGTTTTCGTTCTCTGT |
| | | | CTCCAGCGCA (SEQ ID NO: 81) |
| GstTnpB5 | pSL4673 | 76 | [TTCAT]CGCCCCTCTTGTTTGTTGTGCAAATTGGTC |
| | | | CGGTTCCTTA (SEQ ID NO: 82) |
| GstIscB1 | pSL4164 | 77 | TGCGGAGCCGTTGCAACAAGGGCGCTTGTGTGTAGGG |
| | | | AAG[ATGAA] (SEQ ID NO: 83) |
| GstTnpA | pSL4129 | 78 | N/A |
| | | Vector | |
| | | sequence | |
| | Vector ID, | SEQ ID NO | |
| | mammalian | (guide | |
| | expression | RNA), | |
| | (guide | mammalian | Target of the guide RNA in |
| | RNA) | expression | human cell experiments (TAM in brackets) |
| GstTnpB1 | pSL4934 | 90 | [TTTAA]TAAGCATGGTATAGTG (SEQ ID NO: 95) |
| | | | [TTTAA]TTACATATTTATCAAT (SEQ ID NO: 96) |
| | | | [TTTAA]GCAAGGGCTGATGTGG (SEQ ID NO: 97) |
| | | | [TTTAA]TTAGGTGGGTGGTCAT (SEQ ID NO: 98) |
| | | | [TTTAA]CCCTCCAGTGTATCCA (SEQ ID NO: 99) |
| GstTnpB3 | pSL4940 | 91 | [TTTAT]CAATTACAACTTGACG (SEQ ID NO: 100) |
| | | | [TTTAT]CAGTTTTGGAGGATGT (SEQ ID NO: 101) |
| | | | [TTTAT]GTACATCCTCCAAAAC (SEQ ID NO: 102) |
| | | | [TTTAT]TATTATTGTTTGCAAT (SEQ ID NO: 103) |
| GstTnpB4 | pSL4946 | 92 | [TTTAA]TAAGCATGGTATAGTG (SEQ ID NO: 95) |
| | | | [TTTAA]TTACATATTTATCAAT (SEQ ID NO: 96) |
| | | | [TTTAA]GCAAGGGCTGATGTGG (SEQ ID NO: 97) |
| | | | [TTTAA]TTAGGTGGGTGGTCAT (SEQ ID NO: 98) |
| | | | [TTTAA]CCCTCCAGTGTATCCA (SEQ ID NO: 99) |
| GstTnpB5 | pSL4952 | 93 | [TTCAT]GCAGGTGCTGAAAGCC (SEQ ID NO: 104) |
| | | | [TTCAT]CCTAGCAACTTCTCTG (SEQ ID NO: 105) |
| | | | [TTCAT]TTTCCAGCTCTAGAAG (SEQ ID NO: 106) |
| | | | [TTCAT]CAATTAGCCCATCACA (SEQ ID NO: 107) |
| | | | [TTCAT]TCAACAAATATTTACT (SEQ ID NO: 108) |
| GstIscB1 | pSL4925 | 94 | GGCTTTCAGCACCTGC[ATGAA] (SEQ ID NO: 109) |
| | | | CTTCTAGAGCTGGAAA[ATGAA] (SEQ ID NO: 110) |
| | | | GCCTTCTAGAGCTGGAAA[ATGAA] |
| | | | (SEQ ID NO: 111) |
| | | | TGTGATGGGCTAATTG[ATGAA] (SEQ ID NO: 112) |
| | | | AGTAAATATTTGTTGA[ATGAA] (SEQ ID NO: 113) |
| | | | GCTCATAGTAAATATTTGTTGA[ATGAA] |
| | | | (SEQ ID NO: 114) |

TABLE 8
Plasmids

| Plasmid ID | Description | SEQ ID NO: |
|---|---|---|
| pSL0007 | Empty Vector | 115 |
| pSL0008 | Empty Vector | 116 |
| | Empty Vector | 117 |
| pSL4873 | Mock excised ISGst1 | 118 |
| pSL4872 | ΔtnpA ISGst1 | 119 |
| pSL4675 | tnpA + ISGst1 | 120 |
| pSL4735 | tnpA (Y125A) + ISGst1 | 121 |
| pSL4676 | tnpA + ISGst2 | 122 |
| pSL4677 | tnpA + ISGst3 | 123 |
| pSL4678 | tnpA + ISGst4 | 124 |
| pSL4674 | tnpA + ISGst5 | 125 |
| pSL4736 | tnpA (Y125A) + ISGst2 | 126 |
| pSL4685 | tnpA + ISGst2 (leading) | 127 |
| pSL4680 | tnpA + ISGst2 left end del. | 128 |
| pSL4681 | tnpA + ISGst2 right end del. | 129 |
| pSL4738 | TAM mutant TTTAT to GGGCG | 130 |
| pSL4818 | ISGst2 TAM to IS608 TAM | 131 |
| pSL4819 | ISGst2 left end guide to IS608 left end | 132 |
| | guide | |
| pSL4820 | ISGst2 TAM & left end guide to IS608 | 133 |
| pSL4827 | ISGst2 TAM to TEM | 134 |
| pSL4828 | ISGst2 TEM to TAM | 135 |
| pSL2698 | Hpy-tnpA+ IS608 mini-Tn | 136 |
| pSL4028 | Hpy-tnpA (Y127A)+ IS608 mini-Tn | 137 |
| pSL4840 | Gst-tnpA + IS608 mini-Tn | 138 |
| pSL4695 | Hpy-tnpA + ISGst1 mini-Tn | 139 |
| pSL4245 | Gst-tnpA + ISGst2 mini-tn | 140 |
| pSL4972 | ISGst2 mini-tn | 141 |
| pSL4624 | ISGst1 TnpB | 73 |
| pSL4369 | ISGst2 TnpB | 74 |
| pSL4672 | ISGst3 TnpB | 142 |
| pSL4673 | ISGst4 TnpB | 76 |
| pSL4164 | ISGst5 IscB | 77 |
| pSL4032 | Non-targeting | 72 |
| pSL4625 | ISGst1 native target | 143 |
| pSL4128 | ISGst2 native target | 144 |
| pSL4670 | ISGst3 native target | 145 |
| pSL4671 | ISGst4 native target | 146 |
| pSL4031 | ISGst5 native target | 147 |
| pSL4712 | ISGst2 native target TAM GGGCG | 148 |
| pSL4831 | ISGst2 native target TAM TTCAC | 149 |
| pSL4832 | ISGst2 native target TAM TTCAT | 150 |
| pSL4833 | ISGst2 native target TAM TTTAC | 151 |
| pSL4713 | ISGst5 native target TAM GGGCG | 152 |
| pSL4834 | ISGst5 native target TAM TTGAC | 153 |
| pSL4835 | ISGst5 native target TAM TTGAT | 154 |
| pSL4836 | ISGst5 native target TAM TTCAC | 155 |
| pSL4518 | ISGst2 tnpB | 156 |
| pSL4664 | ISGst2 tnpB (D196A) | 157 |
| pSL4478 | ISGst5 iscB | 158 |
| pSL4667 | ISGst5 iscB (D59A, H209A,H210A) | 159 |
| pSL4359 | GstTnpB2 Promoter Screen | 160 |
| pSL4360 | GstTnpB2 Promoter Screen | 161 |
| pSL4361 | GstTnpB2 Promoter Screen | 162 |
| pSL4362 | GstTnpB2 Promoter Screen | 163 |
| pSL4363 | GstTnpB2 Promoter Screen | 164 |
| pSL4364 | GstTnpB2 Promoter Screen | 165 |
| pSL4365 | GstTnpB2 Promoter Screen | 166 |
| pSL4366 | GstTnpB2 Promoter Screen | 167 |
| pSL4367 | GstTnpB2 Promoter Screen | 168 |
| pSL4368 | GstTnpB2 Promoter Screen | 169 |
| pSL4370 | GstTnpB2 Promoter Screen | 170 |
| pSL4033 | IS608 TnpB Target | 171 |
| pSL4035 | ISDra2 TnpB Target | 172 |
| pSL4111 | DraTnpB | 173 |
| pSL3858 | HpyTnpB TnpB | 174 |
| pSL4477 | GstTnpB2 LacZ guide | 175 |
| pSL4519 | GstTnpB2 LacZ guide | 176 |
| pSL4520 | GstTnpB2 LacZ guide | 177 |
| pSL4617 | ChIP Seq | 178 |
| pSL4576 | ChIP Seq | 179 |
| pSL4618 | ChIP Seq | 180 |
| pSL4577 | ChIP Seq | 181 |
| pSL1739 | ChIP Seq | 182 |
| pSL4865 | ChIP Seq | 183 |
| pSL4514 | TAM Library IscB | 184 |
| pSL4841 | N6 TAM Library | 67 |
| pSL4529 | GstTnpA expression vector | 185 |
| pSL4534 | Catalytically inactive GstTnpA expression | 186 |
| | vector | |
| pSL4740 | dGstTnpB native target | 187 |
| pSL4672 | E. coli expression GstTnpB4 | 75 |
| pSL4129 | E. coli expression GstTnpA | 78 |
| pSL4745 | Mammalian Expression Vector GstTnpB1 | 84 |
| pSL4746 | Mammalian Expression Vector GstTnpB3 | 85 |
| pSL4747 | Mammalian Expression Vector GstTnpB4 | 86 |
| pSL4748 | Mammalian Expression Vector GstTnpB5 | 87 |
| pSL4744 | Mammalian Expression Vector GstIscB1 | 88 |
| pSL4749 | Mammalian Expression Vector GstTnpA | 89 |
| pSL4934 | Mammalian Expression Vector GstTnpB1 | 90 |
| pSL4940 | Mammalian Expression Vector GstTnpB3 | 91 |
| pSL4946 | Mammalian Expression Vector GstTnpB4 | 92 |
| pSL4952 | Mammalian Expression Vector GstTnpB5 | 93 |
| pSL4925 | Mammalian Expression Vector GstIscB1 | 94 |
| pSL5514 | TnpB expression plasmid from a native | 188 |
| | IStron locus | |
| pSL5517 | Nuclease-dead TnpB expression plasmid | 189 |
| | from a native IStron locus | |
| pSL5412 | 3xFLAG-TnpB expression construct | 190 |
| pSL5772 | Native IStron expression plasmid | 191 |
| pSL5515 | Mini-IS expression plasmid for splicing; | 192 |
| | pDonor for transposition | |
| pSL5735 | TnpA expression plasmid | 193 |
| pSL5736 | Mutant TnpA expression plasmid | 194 |
| pSL5868 | Transposition intermediate for integration | 195 |
| | assays | |
| pSL5820 | wRNA expression vector | 196 |
| pSL5239 | Human codon optimized TnpB with C- | 197 |
| | terminal NLS | |
| pSL5490 | CboTnpB wRNA for expression in human | 198 |
| | cells, with HDV ribozyme at 3′ end | |
| pSL6177 | CboTnpA transposition donor with | 199 |
| | minimal ends | |
| pSL5761 | Expression vector for minimal intron | 200 |
| | showing efficient splicing | |
| pSL5963 | Expression vector for minimal intron | 201 |
| | showing splicing | |
| pSL4902 | TnpB and ωRNA with native target | 68 |
| pSL5002 | TnpB and ωRNA with library target | 69 |
| pSL5004 | TnpB(D190A) and ωRNA with native | 70 |
| | target | |
| pSL4906 | pTarget (Cbo native guide) | 71 |

[0339] The scope of the present invention is not limited by what has been specifically shown and described hereinabove. Those skilled in the art will recognize that there are suitable alternatives to the depicted examples of materials, configurations, constructions, and dimensions. Variations, modifications, and other implementations of what is described herein will occur to those of ordinary skill in the art without departing from the spirit and scope of the invention.

[0340] Numerous references, including patents and various publications, are cited and discussed in the description of this invention. The citation and discussion of such references is provided merely to clarify the description of the present invention and is not an admission that any reference is prior art to the invention described herein. All references cited and discussed in this specification are incorporated herein by reference in their entirety.

1. A engineered system comprising:
a TnpA protein, a TnpB protein, an IscB protein, or a combination thereof, or one or more nucleic acids encoding thereof; and
optionally, at least one guide RNA, or one or more nucleic acids encoding thereof, wherein the at least one guideRNA is complementary to at least a portion of a target nucleic acid,
wherein at least one of the TnpA, TnpB, and IscB protein is derived from Geobacillus stearothermophilus, Clostridium botulinum, Clostridium senegalense or Clostridioides difficile.

2. The system of claim 1, wherein the TnpA protein comprises an amino acid sequence having at least 70% identity to any of SEQ ID NO: 11, 21, 25, and 38-41, the TnpB protein comprises an amino acid sequence having at least 70% identity to any of SEQ ID NOS: 1-4, 6-9, 17, 22-24, 30-37, and 42-50, the IscB protein comprises an amino acid sequence having at least 70% identity to SEQ ID NO: 5 or 10, or a combination thereof.

3. A system comprising:
a TnpA protein comprising an amino acid sequence having at least 70% identity to SEQ ID NO: 11, 21, 25, and 38-41, or a nucleic acid encoding thereof,
a TnpB protein comprising an amino acid sequence having at least 70% identity to any of SEQ ID NOs: 1-4, 6-9, 17, 22-24, 30-37, and 42-50, or a nucleic acid encoding thereof,
an IscB protein comprising an amino acid sequence having at least 70% identity to SEQ ID NO: 5 or 10, or a nucleic acid encoding thereof, or
a combination thereof; and
optionally, at least one guide RNA, or a nucleic acid encoding thereof, wherein the at least one guide RNA is complementary to at least a portion of a target nucleic acid.

4. The system of claim 1, wherein the system comprises a TnpA protein and a DNA nuclease capable of inducing site-specific single or double strand breaks, or one or more nucleic acids encoding thereof.

5. The system of claim 1, wherein the system comprises a TnpA protein and at least one of the TnpB protein or IscB protein, or one or more nucleic acids encoding thereof.

6. The system of claim 1, further comprising at least one guide RNA comprising a scaffold sequence capable of associating with the TnpA, TnpB, IscB protein, or a combination thereof and a guide sequence complementary to at least a portion of a target nucleic acid.

7. The system of claim 6, wherein the at least one guide RNA is provided on an omega RNA.

8. The system of claim 1, wherein the TnpA protein, TnpB protein, and/or IscB protein are at least partially catalytically inactivated, and optionally fused to an effector polypeptide.

9. The system of claim 1, wherein any or all of the TnpA protein, TnpB protein, and IscB protein comprise at least one nuclear localization sequence (NLS).

10. The system of claim 1, further comprising a target nucleic acid and/or donor nucleic acid.

11. The system of claim 10, wherein the donor nucleic acid is flanked by at least one of a left end sequence and a right end sequence.

12. A method for DNA modification comprising contacting a target nucleic acid sequence with a system of claim 1.

13. The method of claim 12, wherein the target nucleic acid sequence is flanked by on the 5′ end by a transposon-adjacent motif (TAM) sequence and, optionally, the 3′ end by a transposon-encoded motif (TEM) sequence.

14. The method of claim 12, wherein the modification comprises cleavage of the target nucleic acid, excision of the target nucleic acid, integration of the donor nucleic acid, or a combination thereof.

15. The method of claim 12, wherein the target nucleic acid sequence is in a cell and the contacting a target nucleic acid sequence comprises introducing the system into the cell.

16. The system of claim 3, further comprising:
at least one guide RNA comprising a scaffold sequence capable of associating with the TnpA, TnpB, IscB protein, or a combination thereof and a guide sequence complementary to at least a portion of a target nucleic acid;
a target nucleic acid; and/or
donor nucleic acid.

17. The system of claim 3, wherein the system comprises:
a TnpA protein; and
a DNA nuclease capable of inducing site-specific single or double strand breaks or at least one of the TnpB protein or IscB protein; or
one or more nucleic acids encoding thereof.

18. The system of claim 3, wherein the TnpA protein, TnpB protein, and/or IscB protein are at least partially catalytically inactivated, and optionally fused to an effector polypeptide.

19. The system of claim 3, wherein any or all of the TnpA protein, TnpB protein, and IscB protein comprise at least one nuclear localization sequence (NLS).

20. A method for DNA modification comprising contacting a target nucleic acid sequence with a system of claim 3.

The application's sequence listing, which the Patent Office published only in electronic form, follows.

SEQUENCE LISTING (353 sequences)

SEQ ID NO: 1 - protein, 369 aa, Geobacillus stearothermophilus
MANKAYQFRLYPTKEQEQLLAKTFGCVRFVYNKMLEERIQMFEKFKDDQESLKQQTCPTPAKYKKEFPWLKEVDSLALANAQLNLQKAFQHFFSGRAGFPKFKNRKAKQSYTTNMVNGNIKLSDGYIKLPKLKWIKLKQHREIPAHHIIKSCTITKTKTGKYYISILTEYEHQPAPKEVQTVVGLDFSMSTLYVDSEGKRANYPRFYRKALETLAKEQRKLSRKKKGSNRWHKQRLKVAKLHEKIANQRKDFLHKESHKLAKRYDCVVIEDLNMKGMSQALHFGQGVHDNGWGMFTTFLQYKLAEQGKKLIKIDKWFPSSKTCSCCGRVKESLSLSERTFRCECRFESDRDVNAAINIKHEGMKRLAIV

SEQ ID NO: 2 - protein, 415 aa, Geobacillus stearothermophilus
MYFCIKQQLNGLTKEEYLTLRELCHIAKNMYNVGLYNVRQYYFEHKEFLNYEKNYHLAKTNENYKLLNSNMAQQILKKVNEAFKSFFGLISLAKQGKYDHKAISIPKYLKKDGFHSLIIGQIRIDGNKFTIPYSRLFKKTHKPITITIPPVLLDKKIKQIEIIPKHHARFFEIQYKYEMPEDQRELNDQKALAIDLGLNNLATCVTSDGRSFIIDGRRLKSINQWFNKENARLQSIKDKQKIKGTTRKQALLAMNRNNKVNDYINKTCRYIINYCIENQIGKLVIGYAETWQRNMNLGKKTNQNFVNIPLGNIKEKLEYLCEFYGIEFLKQEESYTSQASFFDGDEIPEYNADNPKEYKFSGKRIKRGLYRTKSGKLINADVNGALNILKKSKAVDLSVLCSSGEVDTPQRIRIA

SEQ ID NO: 3 - protein, 392 aa, Geobacillus stearothermophilus
MYRTLKTRFRAKKEVIQKLFECNRISAEVWNECLRLAKEHHLETGKWITKTELQKATKGRFSIHSQSIQAVVHKYIFARDGAKEARKKGEKIKYPYKKKKHFNTKWAKDGFVLHEDGTLELSLGIWNRKRQSPLVVKIDKEKLPNGKVKEIELVYDRGLWLCLSYEDGKKPKENPCKNRVAIDPGEIHTIAAICENGESLIITGRKIRSIHRLRNKKLKELQKLMSRCKKGSKQWKKYNRAKQYVLSKSEAQLKDALHKTTRQFVRWCLENQVKEVVIGDIEGIQRNTKKKRNKKTNQKLSNWSFGKLFDYLKYKLNAEGIQIEKKDESYTSQTCPVCGKKNKSSSRNYTCQCGYKRHRDIHGAMNLFAKVYYGEIRPLEFTVKPFTYRRIA

SEQ ID NO: 4 - protein, 372 aa, Geobacillus stearothermophilus
MDMTLTAKIKIYPTAEQAEVLKATLSAYRQACNAVSVVIFDTKVLAQAKLHDMTYRLLRSNYALRSQMAQSVIKTVIARYRSLKSNGHEWTLVRFKKPEYDLVWNRDYSIVQGLFSVNTLEGRIKVSFEPKGMEPYFDGSWTFGTAKLVYKHNKFFLHIPMTKTIPTVDEHNIRQVVGVDVGVNFLAVAYDSQGKTIFFNGRKIKHMRAKYKRMRKTLQQKGTASARRKLKTIGQRENRWMTDVNHAVTKALVRQYGERTLFVLEDLTGIREKTERVRIHDRYETVSWAFYQFRQMLEYKARLHGSKVIVVAPHYTSLTCPKCGHTEKANRKKRTHTFCCRTCGYTSNDDRIGAMNLQRKGIEYIVEGTTQA

SEQ ID NO: 5 - protein, 417 aa, Geobacillus stearothermophilus
MYIINKHGKPLMPCSPRKARLLLKQKKAKVVRRTPFTIQLLYGSSGYKQPVSLGVDMGTRHVGISATTKKDVLFEAEAQLRTDIVELLAIRRQFRRSRRNRKTRYREARFLNRRKPEGWLPPSIQHKINSHIKLIDLVHNILPVTSVTIEVAAFDTQKLKNLNIRGVEYQQGEQMGFWNVREYVLYRDNHTCQYCKGKKKDPVLQVHHIESRKTGGDSPDNLITLCKTCHHEIHEKGLEHIFQRKRPPMRDASQMTAMRWAMFSRIREKYSHANITYGYITKCIRIANGLSKSHMVDARCISGNPLAKPSGTVYLLKFVRKNNRQLHKATILKGGKRKSNKAPRFVKGFQLFDKVVYERKECFIFGRRSSGYFDLRLLDGTKVHASASWKKLKRVEHASTLLIERRKGDSSPTFALA

SEQ ID NO: 6 - protein, 370 aa, Geobacillus stearothermophilus
MVANKAYQFRLYPTKEQEQLLAKTFGCVRFVYNKMLEERIQLFEKFKDDQESLKQQTCPTPAKYKKEFPWLKEVDSLALANAQLNLQKAFQHFFSGRAGFPKFKNRKAKQSYTTNMVNGNIKLSDGYIKLPKLKWIKFKQHREIPAHHIIKSCTITKTKTGKYYISILTEYEHQPALKEVQTVVGLDFSMSTLYVDSEGKRANYPRFYRKALETLAKEQRKLSRKKKGSNRWHKQRLKVAKLHEKMANQRKDFLHKESHKLAKRYDCVVIEDLNMKGMSQALHFGQGVHDNGWGMFTTFLQYKLAEQGKKLIKIDKWFPSSKTCSCCGRVKESLSLSERTFRCECGFESDRDVNAAINIKHEGMKRLAIV

SEQ ID NO: 7 - protein, 416 aa, Geobacillus stearothermophilus
MGYFCIKQQLNGLTKEEYLTLRELCHIAKNMYNVGLYNVRQYYFEHKEFLNYEKNYHLAKTNENYKLLNSNMAQQILKKVNEAFKSFFGLISLAKQGKYDHKAISIPKYLKKDGFHSLIIGQIRIDGNKFTIPYSRLFKKTHKPITITIPPVLLDKKIKQIEIIPKHHARFFEIQYKYEMPEDQRELNDQKALAIDLGLNNLATCVTSDGRSFIIDGRRLKSINQWFNKENARLQSIKDKQKIKGTTRKQALLAMNRNNKVNDYINKTCRYIINYCIENQIGKLVIGYAETWQRNMNLGKKTNQNFVNIPLGNIKEKLEYLCEFYGIEFLKQEESYTSQASFFDGDEIPEYNADNPKEYKFSGKRIKRGLYRTKSGKLINADVNGALNILKKSKAVDLSVLCSSGEVDTPQRIRIA

SEQ ID NO: 8 - protein, 393 aa, Geobacillus stearothermophilus
MGYRTLKTRFRAKKEVIQKLFECNRISAEVWNECLRLAKEHHLETGKWITKTELQKATKGRFSIHSQSIQAVVHKYIFARDGAKEARKKGEKIKYPYKKKKHFNTKWAKDGFVLHEDGTLELSLGIWNRKRQSPLVVKIDKEKLPNGKVKEIELVYDRGLWLCLSYEDGKKPKENPCKNRVAIDPGEIHTIAAICENGESLIITGRKIRSIHRLRNKKLKELQKLMSRCKKGSKQWKKYNRAKQYVLSKSEAQLKDALHKTTRQFVRWCLENQVKEVVIGDIEGIQRNTKKKRNKKTNQKLSNWSFGKLFDYLKYKLNAEGIQIEKKDESYTSQTCPVCGKKNKSSSRNYTCQCGYKRHRDIHGAMNLFAKVYYGEIRPLEFTVKPFTYRRIA

SEQ ID NO: 9 - protein, 372 aa, Geobacillus stearothermophilus; identical to SEQ ID NO: 4

SEQ ID NO: 10 - protein, 420 aa, Geobacillus stearothermophilus
MGFVYIINKHGKPLMPCSPRKARLLLKQKKAKVVRRTPFTIQLLYGSSGYKQPVSLGVDMGTRHVGISATTKKDVLFEAEAQLRTDIVELLAIRRQFRRSRRNRKTRYREARFLNRRKPEGWLPPSIQHKINSHIKLIDLVHNILPVTSVTIEVAAFDTQKLKNLNIRGVEYQQGEQMGFWNVREYVLYRDNHTCQYCKGKKKDPVLQVHHIESRKTGGDSPDNLITLCKTCHHEIHEKGLEHIFQRKRPPMRDASQMTAMRWAMFSRIREKYSHANITYGYITKCIRIANGLSKSHMVDARCISGNPLAKPSGTVYLLKFVRKNNRQLHKATILKGGKRKSNKAPRFVKGFQLFDKVVYERKECFIFGRRSSGYFDLRLLDGTKVHASASWKKLKRVEHASTLLIERRKGDSSPTFALA

SEQ ID NO: 11 - protein, 132 aa, Geobacillus stearothermophilus
MKLDNNNHSVFLLYYHLVLVVKYRRQVIDDTISDYAKDMFVRLGKNYNISLVEWNHDMDHVHILFKAHPNSELSKFINAYKSASSRLIKKHFPQVKRKLWKEYFWSRSFCLLTTGGAPIEVIKKYIENQGMK

SEQ ID NO: 12 - RNA, 440 nt, synthetic construct
  source 1..440: mol_type = other RNA
ggatgtcacaagccctccatttcggtcaaggcgttcatgacaacggctggggcatgttcaccactttccttcagtacaagctggccgaacaggggaagaagctgatcaaaatcgacaaatggttcccctcgtccaaaacgtgttcgtgctgcggtcgagtcaaggagtctctatcgctttctgaacggacattccgctgtgaatgtggattcgagagcgacagggacgtcaatgcggccatcaatatcaaacatgagggcatgaaacgattggcgatcgtctaatttgtcctcgaaccgtggggcacacggggatcgctcggtcaacttcccatcatgagatgggattacccgagaagcccccacctctaagcgaagcgtaggtggtgggagtatgtcacnnnnnnnnnnnnnnnnnnnnnnnnnnnnnnnnnnnnnnnn

SEQ ID NO: 13 - RNA, 263 nt, synthetic construct
  source 1..263: mol_type = other RNA
ttaagcgcggcttgtatcgaacaaagtctggcaaactaattaatgctgatgtcaatggcgcattaaacatcttaaagaaaagtaaagctgtagacctgagtgtcttatgctctagcggcgaagtggacacgcctcaaagaataaggattgcttgaagcagtcaaacttctttggaagcccccacttcaaattttcgctagaaaattaagtgggggtagttcacnnnnnnnnnnnnnnnnnnnnnnnnnnnnnnnnnnnnnnnn

SEQ ID NO: 14 - RNA, 260 nt, synthetic construct
  source 1..260: mol_type = other RNA
tttacggtcaaaccgtttacgtatcgacggattgcttaggtatgaagtcgtagatggcgagttcccgcccttgagtatcatggatactcatgttgcctgtggctcccaacgggacgggtgccaggtgttgcctgcagataggctgccaaccagcctatcatgcatccacctccgaaggggaaacaggaaacccccacttcgataagtgggggaggttcatnnnnnnnnnnnnnnnnnnnnnnnnnnnnnnnnnnnnnnnn

SEQ ID NO: 15 - RNA, 237 nt, synthetic construct
  source 1..237: mol_type = other RNA
tatacctcaaacgatgaccgcattggtgctatgaaccttcaacgaaaaggaatagagtacatcgttgaaggaacgacacaggcatgacctgcgtcgttgggtagttgtcaacctgccccctgatgcaaccccaagtcaaggaaggaggacgaagtccgctcgcacttctggggagttgcaagcccccacttcaagcgttagctaagtgggggtagttgacnnnnnnnnnnnnnnnnn

SEQ ID NO: 16 - RNA, 322 nt, synthetic construct
  source 1..322: mol_type = other RNA
nnnnnnnnnnnnnnnnnnnnnnnnnnnnnnnnnnnnnnnngtcaactccccaccacttaaagcctaacggcttttgaagtgggggcttggcaagccctagttgactaccctcagccattcaatggctacgttggaagggtcatgacacttacggatgctcctccagtccgtaaccctgtcgcagatggttaaaagctctgatgggtaggagcggtgctgtctgccgaacaagcccttccaacattggggaggaggaactcactcctgaaaggaggtacacgtcttgttcgtgtacattatcaataagcatggaaaaccactc

SEQ ID NO: 17 - protein, 393 aa, Clostridium botulinum
MGIVAIKIKLKPTKEQEVLFWKSAGVARWSYNYFLSESERHYQEYLEGKQDKKTIKESEVRKYINNVLKKTTHTWLEEVGSNVMKQAVKDADIARKRWFDGVANKPKFKSKRKSKVSFYVNYESLKRTNNGFRGEKIGVVKTYQALPKLKKGEKYSNPRISFDGMNWFISIGYNNEFKAVKLTDVSLGIDVGIKELAVCSDGQFKKNINKTKRVRFLEKKLKREQRKISHKLEANIKSYDKNRKPIYKRPLRDMKNIQKQNRIIRNLYKKLENIRTNYLHQCSNEIVKTKPSRIVMETLNIKGMMKNKHLSKAIANQKLYEFKRQIQYKCKKYGIKFVEADKWYPSSKTCSCCGQVKSDLKLKDRLYVCNCGLKMDRDLNASINLANYQIQSA

SEQ ID NO: 18 - protein, 393 aa, synthetic construct
MGIVAIKIKLKPTKEQEVLFWKSAGVARWSYNYFLSESERHYQEYLEGKQDKKTIKESEVRKYINNVLKKTTHTWLEEVGSNVMKQAVKDADIARKRWFDGVANKPKFKSKRKSKVSFYVNYESLKRTNNGFRGEKIGVVKTYQALPKLKKGEKYSNPRISFDGMNWFISIGYNNEFKAVKLTDVSLGIAVGIKELAVCSDGQFKKNINKTKRVRFLEKKLKREQRKISHKLEANIKSYDKNRKPIYKRPLRDMKNIQKQNRIIRNLYKKLENIRTNYLHQCSNEIVKTKPSRIVMETLNIKGMMKNKHLSKAIANQKLYEFKRQIQYKCKKYGIKFVEADKWYPSSKTCSCCGQVKSDLKLKDRLYVCNCGLKMDRDLNASINLANYQIQSA

SEQ ID NO: 19 - RNA, 260 nt, synthetic construct
  source 1..260: mol_type = other RNA
aattaccaaattcaaagtgcttaacctaaactaagctttgaatatgtacgtaacgatactacggaatttaagcctgttaagagtcatatcaaatggtagtagctttggcaaacccagattcgttgaagcaggaagacacaagacgaaaatcataagacataagtcgtgtcatagtataaatgtctacatttaaatagaaatgtatatatttttcgtatcggttgtgaatttttagccaataaatttaatggtgaaaaagg

SEQ ID NO: 20 - RNA, 260 nt, synthetic construct
  source 1..260: mol_type = other RNA
aattaccaaattcaaagtgcttaacctaaactaagctttgaatatgtacgtaacgatactacggaatttaagcctgttaagagtcatatcaaatggtagtagctttggcaaacccagattcgttgaagcaggaagacacaagacgaaaatcataagacataagtcgtgtcatagtataaatgtctacatttaaatagaaatgtatatatttttcgtatcgggacaagtggttcaccatgcgttgctttatggtatgatag

SEQ ID NO: 21 - protein, 203 aa, Clostridium botulinum
MELMSIGKFAKRVGVNVVTLRRMEAKGEFLPAHVSSGGTRYYSTDQLKYFGKERNAHKLVVGYCRVSTPSQKDDLENQVNNVKSYMIAKGYQFEIIKDIGSGINYKKKGLKELIDKINNQEVSKVVILYKDRLIRFGFELIEYLCQINNVELEIIDHSEKSKEEELTDDLIQIITVFANRLYGQRSKKTKRLIEEVKNNDSSN

SEQ ID NO: 22 - protein, 392 aa, Clostridium botulinum
MIVAIKIKLKPTKEQEVLFWKSAGVARWSYNYFLSESERHYQEYLEGKQDKKTIKESEVRKYINNVLKKTTHTWLEEVGSNVMKQAVKDADIARKRWFDGVANKPKFKSKRKSKVSFYVNYESLKRTNNGFRGEKIGVVKTYQALPKLKKGEKYSNPRISFDGMNWFISIGYNNEFKAVKLTDVSLGIDVGIKELAVCSDGQFKKNINKTKRVRFLEKKLKREQRKISHKLEANIKSYDKNRKPIYKRPLRDMKNIQKQNRIIRNLYKKLENIRTNYLHQCSNEIVKTKPSRIVMETLNIKGMMKNKHLSKAIANQKLYEFKRQIQYKCKKYGIKFVEADKWYPSSKTCSCCGQVKSDLKLKDRLYVCNCGLKMDRDLNASINLANYQIQSA

SEQ ID NO: 23 - protein, 463 aa, Clostridium senegalense
MGTIIKNVKQYSYILDTEMLNELKFIANQYKNVKNYIYSRYSGINSIPLLSKERQIRNEWVKSEFAKQWKLPARYWKLALTEAMGNIKSKWFNIKSKIKEQVKVNENLSDEDKHYINYIVKFNSYYHKVLNYIGFDIPKIFKKKNLNFKYLNNLIRRYTRKYKGHIPYSKIGKTFSIDTGLYSYKNNCINITSTKKGKRLSIKLTDSNKYNRTMIVKIIDNKIVVNCPLKIKTRKNKNTNIIGIDKGYRYLFAVSSDKFYGENLNNYLSKETERLNKVNAQRNRFWALYNQYLDKGYIKKANKIKENNLGKVKYNHNKLKHDQTVKSYINYSLNQLIKEEKPKEIVMENLDFVNWNDKYPKIVKCKLSRWIKGYIRERVEYKCDFYSIKYTYINPAYTSKVCSVCGSFGKRDGDIFICPKCNKFHADINASKNILNRKYDNDITLYTNYKKVKDILEKRIKVS

SEQ ID NO: 24 - protein, 386 aa, Clostridium senegalense
MIIATKIKLKPTNEQEILFWKSAGVARWSYNYFLAESENYYSQYNKTLKEGEVRKHINNVLKKTTHTWLSEVGSNVMKQAVKDANLARKRWFEGLSSKPKFKSRRKSKISFYVNYESLKVVNGGFRGEKIGFIKTYQPLPKLKKGEKYSNPRISFDGRSWFLSVGYEKEFEAIELTGKSLGIDVGIKELAVCSDGEFKKNINKTKKVKNLKRKLRREQRKVSRKIEANIKSYDKNRRPIYKTPLRDMKNIQKQNQIIRNLYKKLTDIRTNHLHQCTSEIVKTKPSRIVMETLNIKGMMKNKHLSKAIQEQNLYEFKRQIKYKCEIYGIEFVEADKWYPSSKTCSCCGAIKKDLKLKDRTYVCPCGLKLDRDLNASINLANYSIQSA

SEQ ID NO: 25 - protein, 203 aa, Clostridium senegalense
MELMSIGKFAKKVGVNVVTLRRMEKKGELLPAHVSSGGTRYYSIEQLSYFGKATNTNKLVIGYCRVSTPSQKDDLVNQVNNVKSYMIAKGYQFEIITDIGSGINYKKKGLKQLINKINNREISKVVILYKDRLVRFGYELIEYMCEINGIELEIIDHSEKSKEEELTDDLIQIITVFANRLYGQRSKKTKKLIDEVKNNDNSN

SEQ ID NO: 26 - RNA, 197 nt, synthetic construct
  source 1..197: mol_type = other RNA
tatgtacgtaacgatactacggaatttaagcctgttaagagtcatatcaaatggtagtagctttggcaaacccagattcgttgaagcaggaagacacaagacgaaaatcataagacataagtcgtgtcatagtataaatgtctacatttaaatagaaatgtatatatttttcgtatcggnnnnnnnnnnnnnnnnnn

SEQ ID NO: 27 - RNA, 197 nt, synthetic construct
  source 1..197: mol_type = other RNA
tatgtacgtaacgatactacggaatttaagcctgttaagagtcatatcaaatggtagtagctttggcaaacccagattcgttgaagcaggaagacacaagacgaaaatcataagacataagtcgtgtcatagtataaatgtctacatttaaatagaaatgtatatatttttcgtatcggttgtgaatttttagccaa

SEQ ID NO: 28 - RNA, 220 nt, synthetic construct
  source 1..220: mol_type = other RNA
ctaggttctgaatatgtacgtaacgatactacggaattcaagcctgtggagggttataacaaatgaaagtagtatgtgatttatcactacaaaatcagattcgttgaaacaggaagatacaaaatgaaagccttatggtataagttgtatcacagtagaaatgtcaacattattataataatgtatatatttttcgtatcggnnnnnnnnnnnnnnnnnn

SEQ ID NO: 29 - RNA, 220 nt, synthetic construct
  source 1..220: mol_type = other RNA
ctaggttctgaatatgtacgtaacgatactacggaattcaagcctgtggagggttataacaaatgaaagtagtatgtgatttatcactacaaaatcagattcgttgaaacaggaagatacaaaatgaaagccttatggtataagttgtatcacagtagaaatgtcaacattattataataatgtatatatttttcgtatcggattcatgatttcattagg

SEQ ID NO: 30 - protein, 377 aa, Clostridium senegalense
VILAKKVRLYPTKEQEQKLWQSVGTARFIYNWTLAKQQENYKNGGKFISDNVLRKEITQLKKTELNWLNEVSNNVAKQAVKDGCNAYKRFFNGLSDKPRFKSRRKCKPSFYNDTSKLKIKDNVVLIEKVGWITIRKNSIPMNCKYTNPRISFDGKYWFIAVGIEKEKLLVELTDESIGIDVGVKDLAICSNRMTFKNINKTKEVKRLKKVLKRKQRKISRKYEINKIESEVKSRCQFKKTNNIIKLEKEIRLLHRRLANIRSNHIHQATNMIVRTKPSRVVMETLNIKNMMKNRHLSKAIAEQSLYDFKVKMKYKCAIYGIEFVEADKWFPSSKTCSKCGAIKKDLKLKDRVYQCSCGLKIDRDFNASINLSRYKLA

SEQ ID NO: 31 - protein, 371 aa, Clostridium senegalense
VILAKKVRLYPTKEQEQKLWQSVGTARFIYNWTLAKQQENYKNGGKFISDNVLRKELTILKKTELNWLNEVSNNVAKQAVKDGCNAYKSFFKGLSDKPRFKSRRKSKPSFYNDTLKLKIKDNVVLIEKVGWITIRKNSIPMNCKYTNPRISFDGKYWFIAVGIEKEKLLVELTDESIGIDVGVKDLAICSNGMSFKNINKTKVIKKLKKTLKRKQRQCSRKYEKNKKGREFVKTKNIAKLERQIRLLHRRLANIRDNHLHQATNKIVKTKPSRVVMETLNIKGIMKNKHLSKAIAEQCLYEFKRQMQYKCELYGIEFVEADKWYPSSKTCSECGHVKTKLSLSERTYICEECGCVIDRDYNASINLSRYSA

SEQ ID NO: 32 - protein, 386 aa, Clostridium senegalense
LKRAYKIEIKPTLAQKIKIHQTIGISRFIYNFYLAHNKEIYQKEKRFVSGMDFSKWLNNEYIPKNQDEKWIKEVSSKATKQAIMNGEKAFKKFFKGESGFPKFKKKKNKDVKAYFPKNNKTDWTIERHRVKIPTIGWMRLKEYGYIPTNSIVKSGTVSQKADRYYVSILVEEDIKPNDKPYSCGIGVDLGIKDTAICSNGIKFKNINKTSKVKKIETKLKREQRKLSRKYESLKIRNKNNKEGATRQNIQKQVVKVQKIHQRLYNIRNDYNNKIVSELVKIKPVFITIEDLAISNMIKNKHLSKAVQKQKLYDLRNKLISKSHQNNIEIRQVSRWYPSSKLCNKCGGVKKDLKLSDRVYNCKCGYSFDRDANASYNLRDAKEYKII

SEQ ID NO: 33 - protein, 386 aa, Clostridium senegalense
LLRAYKIEIKPTLEQKIKIHQTIGISRFIYNFYLAHNKEIYQKEKRFVSGMDFSKWLNNEYIPNNQDKKWIKEVSSKATKQAIMNGEKAFKKFFKGETSFPKFKKKKNKDVKAYFPKNNKTDWTIERHRVKIPTIGWMRLKEYGYIPNNSIVKSGTVSQKSDRYYVSILVEEDIKPNYKPYSCGIGIDLGIKDTAICSNGIKFKNINKMSKVKKIERKLKREQRKLSRKYESLKIRNKNNKEGATRQNIQKQVVKVQKIHQRLYNIRNDYNNKIVSELVKIKPVFITIEDLAISNMIKNKHLSKAVQKQKLYDLRNKLISKSHQNNIEIRQVSRWYPSSKLCNKCGSVKKDLKLSDRVYNCKCGYSFDRDANASYNLRDAKEYKII

SEQ ID NO: 34 - protein, 386 aa, Clostridium senegalense
LKRAYKIEIKPTLAQKIKIHQTIGISRFIYNFYLAHNKEIYQKEKRFVSGMDFSKWLNNEYIPNNQDKKWIKEVSSKATKQAIMNGEKAFKKFFKGETSFPKFKKKKNKDVKAYFPKNNKTDWTIERHRVKIPTIGWMRLKEYGYIPTNSIVKSGTVSQKSDRYYVSILVEEDIKPNDKPYSCGIGIDLGIKDTAICSNGIKFKNINKTSKVKKIERKLKREQRKLSRRYESLKIRNKNNKEGATRQNIQKQVVKVQKIHQRLYNIRNDYNNKIVSELVKIKPVFITIEDLAISNMIKNKHLSKAVQKQKLYDLRNKLISKSHQNNIEIRQVSRWYPSSKLCNKCGSVKKDLKLSDRVYNCKCGYSFDRDANASYNLRDAKEYKII

SEQ ID NO: 35 - protein, 377 aa, Clostridium senegalense
VILAKKVRLYPTKEQEQKLWQSVGTARFIYNWTLVKQQENYKNGGKFISDNVLRKELTILKKTELNWLNEVSNNVAKQAVKDGCNAYKNFFKGLSDKPRFKSRRKSKPSFYNDTSKLKIKDNVVLIEKVGWITIRKNSIPVNCKYTNPRISFDGKYWFIAVGIEKEKLLVELTDESIGIDVGVKDLAICSNGMTFKNINKTKEVKRLKKVLKRKQRKISRKYEINKIESEVKSRCQFKKTNNIIKLEKEIRLLHRRLANIRSNHIHQATNMIVRTKPSRVVMETLNIKNMMKNRHLSKAIAEQSLYDFKVKMKYKCAIYGIEFVEADKWFPSSKTCSKCGAIKKDLKLKDRVYQCSCGLKIDRDFNASINLSRYKLA

SEQ ID NO: 36 - protein, 413 aa, Clostridium senegalense
MKLSFKFRPNVSSKQLEIIEELSYHTTKLYNIINYALRENGFKNYYNIELEFKNNWHCDFLHSHTRQQMFKVLEQNWKSYFASIKDYEVNPSKYKGIPRRPKFKNVDKNKNEIIFTNIAIRFQDGILKLSLSKAIQRLFEVESLNFEVSNKLQSLIDWNSLQQARLTYDKVQKCWCLIVIYNKLEKENNNSNIMAIDLGLDNLATLTFKEGNETYIFCGKKLKSVNAYANKKIAYLQSIEMQKCGSDKFKNTKEINRLRRYRNNYIDDYLHKVSKNIIDKAIEHEVKKIVIGKLKGIKQDMNYNKSFVQIPIQRLAELIKYKAKLQGIEVKFKEESYTSGCSAFDLEPINKKYYDKTRRVVRGLFKSSFGLVNSDINGSLNILRKEEKCIPQLVKTMRDKGKCSRPLRIRVAC

SEQ ID NO: 37 - protein, 386 aa, Clostridium senegalense
LKRAYKMEIKPTLAQKIKIHQTIGISRFIYNFYLAHNKEIYQKEKRFVSGMDFSKWLNNEYIPNNQDKKWIKEVSSKATKQAIMNGEKAFKKFFKGEAGFPKFKKKKNKDVKAYFPKNNKTDWTIERHRVKIPTIGWMRLKEYGYIPTNSIVKSGTVSQKADRYYVSILVEEDIKSNDKPYSCGIGVDLGIKDTAICSNGIKFKNVNKTSKVKKIERKLKREQRKLSRKYESFKIRNKNNKEGATRQNIQKQVVKVQKIHQRLYNIRNDYNNKIVSELVKIKPVFITIEDLAISNMIKNKHLSKAIQKQKLYDLKNKLISKSHQNNIEIRQVSRWYPSSKLCNKCGSIKKDLKLSDRVYNCKCGYRFDRDANASYNLRDAKEYKII

SEQ ID NO: 38 - protein, 208 aa, Clostridium senegalense
MKYYSIGEFATQIGKTIQTLRNWDKNGTLKPSHITAGGTRYYSQEQLNHFLGLKSEVQLSKKTIGYCRVSSHKQKDDLARQIENVKTYMYAKGYQFEIIQDIGSGINYNKKGLNQLIDMITNSEVDKIVVLYKDRLIRFGYELIENLCNKYGTTIEVIDNTEKSEEQELVEDLIQIVTVFSCRLQGKRADKAKKMIKELLESDSSQES

SEQ ID NO: 39 - protein, 206 aa, Clostridium senegalense
VKYYSIGKFSKLIGRTTQTLRDWDKKGVLKPQHVAPSGYRYYSQEQLNHFLGIKGIETKKVIGYCRVSSHKQKDDLARQIENVKTYMYAKGYQFEIIQDIGSGINYSKKGLNQLIDMITNSEVEKIVILYKDRLLRFGFEIIENLCNKYGTTIEIIDNTEKTEEQELVEDLIQIVTVFSCTLQGKRANKVNKMIKELLESDPSQES

SEQ ID NO: 40 - protein, 209 aa, Clostridium senegalense
MKHITNYKPKDFAELLYVSVKTLQRWDREDILKAKRTPTNRRYYTYDQYLEFKGLKKEIERKIIIYTRVSTNNQKDDLKNQIEFLKNFANVKGIIVDDVISDIGSGLNYNRKKWNKLLDECMENKIDSILITHKDRFIRFGYNWFERFLVKFDVKIIVVNNKSFSPQEESVQDKISILHVFSCRIYGLRKYKKKIKEDEEIEKSLQDRD

SEQ ID NO: 41 - protein, 208 aa, Clostridium senegalense
MKYYSIGEFATRIGKTIQTLRNWDKNGTLKPSHITAGGTRYYSQEQLNHFLGLKSEVQLSKKTIGYCRVSSHKQKDDLPKQIENVKTYMYAKGYQFEIIQDIGSGINYNKKGLNQLIDMITNSEVDKIVVLYKDRLIRFGYELIENLCNKYGTTIEVIDNTEKSEEQELVEDLIQIVNVFSCRLQGKRADKAKKMIKELLESDSSQES

SEQ ID NO: 42 - protein, 387 aa, Clostridioides difficile
MIKTHRVKLNLTRTQFELVREKQMESANCWNYIVNLSKEYYFEHKQWIKKNDIQKLIKGKYNLHSQTIQAISDKFDANRKTISELRKKGNTKAKYPYKTKKFYIIPFKASAINRNAKGNLKLSMSKGRYLELDFNVENIKTAEIVWRNGYYLYYTFDNELNGVVAKGTNTVGVDLGEIHSIASVTNEGVGLILSNREGRSIKQFRNKMYAYISKRLSKCKKGSRQSKKLWRLKNKIRSKTDNQLMNLYHQTTRKFIDFCVEQKVCEIVLGDIKGVEKDTKKKKRLNRVNRQKISQMEYGRIKDYIKYKAKEQGIEVKLVKENYTSQTCPKCSKKHKPTGRTYSCTCGYETHRDIVGAWNILNKKHKYGLVDFRINHKQPINLKVSTV

SEQ ID NO: 43 - protein, 372 aa, Clostridioides difficile
VIAVEKAYKFRMYPNKKQQELINKTFGCCRFVYNKYLAKRIDVYKNDKETFTYKQCSSDLTNLKKELKWLKEPDKFSLQNALKDLDNAYKKFFKEKAGLPKFKSKKINRFSYKTNFTNGNIMYCGQHIKLPKLGMVKIRDKQVPQGRILNATISKEPSGRYYVSLCCTDVDIEVFENTNNQIGLDLGIKEFCISSCGEFIENPKYLKKSLNKLAKLQRELSRKTIGSLNRNKARLKVAGLQEHIANQRKDFLQKLSTKLIKENDIICIEDLQVKNMIRNRKLSRLISDVSWSEFIRQLEYKANWHGRQIVKVGKFFASSQICNKCGYKNEEVKDLNIREWICPSCNETHDRDINASINILKEGLRLITIQNK

SEQ ID NO: 44 - protein, 372 aa, Clostridioides difficile
VIAVKKAYKFRMYPNKKQQELINKTFGCCRFVYNKYLAKRIDVYKSDKETFTYKQCSSDLTNLKKELKWLKEPDKFSLQNALKDLDNAYKKFFKEKAGFPKFKSKKINRFSYKTNFTNGNIMYCGQYIKLPKLGMVKIRDKQVPQGRILNATISKEPSGRYYVSLCCTDVDIEVFENTNNHIGLDLGIKEFCISSCGDFIENPKYLKKSLNKLAKLQRELSRKTIGSLNRNKARLKVAGLQEHIANQRNDFLQKLSTKLIKENDIICIEDLQVKNMIRNRKLSRLISDVSWSEFIRQLEYKANWYGRQIVKVGKFFASSQICNKCGYKNEEIKDLNIREWICPSCNETHDRDINASINILKEGLRLITIQNK

SEQ ID NO: 45 - protein, 372 aa, Clostridioides difficile
VIAVKKAYKFRIYPNKKQQELINKTFGCCRFVYNKYLAKRIDVYKNDKETFTYKQCSSDLTNLKKELNWLKEPDKFSLQNALKDLDNAYKKFFKEKAGFPKFKSKKINRFSYKTNFTNGNIMYCGQHIKLPKLGMVKVRDKQVPKGRILNATISKEPSGRYYVSLCCTDVDIEVFENTNNHIGLDLGIKEFCISSCGEFIENPKYLKKSLNKLAKLQRELSRKTIGSLNRNKTRLKVARLQEHIANQRNDFLQKLSTKLIKENDIICIEDLQVKNMIRNRKLSRLISDVSWSEFIRQLEYKANWHGRQIVKVGKFFASSQICNKCGYKNEEVKDLNIREWICPSCNETHDRDINASRNILKEGLRLITIQNK

SEQ ID NO: 46 - protein, 372 aa, Clostridioides difficile
VAVVEKAYKFRMYPNKKQQELINKTFGCCRFVYNKYLAKRIEVYKNNKETFTYKQCSSDLTNLKKELKWLKEPDKFSLQNALKDLDNAYKKFFKEKSGFPKFKSKKINRFSYKTNFTNGNIMYFSQHIKLPKLGMVKIRDKQVPQGRILNATISKEPSGRYYVSLCCTDVDIEAFENTNNQIGLDLGIKEFCISSCGDFIENPKYLKKSLSKLAKLQRELSRKTIGSLNRNKARLKVARLQEHIANQRNDFLQKLSTKLIKENDIICIEDLQVKNMIRNRKLSRLISDVSWSEFIRQLKYKANWHGRQIVKVGKFFASSQICNKCGYKNEEVKDLNVREWICPSCNETHDRDINASINILKEGLRLITIQNK

SEQ ID NO: 47 - protein, 372 aa, Clostridioides difficile
VVVVEKAYKFRMYPNKKQQELINKTFGCCRFVYNKYLAKRIDVYKNNKETFTYKQCSSDLTNLKKELKWLKEPDKFSLQNALKDLDNAYKKFFKEKTGFPKFKSKKINRFSYKTNFTNGNIMYCGQHIKLPKLGMVKIRDKQVPQGRILNATISKEPSGRYYVSLCCTDVDIEAFENTNNHIGLDLGIKEFCISSCGEFIENPKYLKKSLNKLAKLQRELSRKTIGSLNRNKARLKVARLQEHIANQRKDFLQKLSTKLIKENDIICIEDLQVKNMIKNHKLSRSISDVSWSEFIRQLEYKANWHGRQIVKVGKFFASSQICNKCGYKNEEVKNLNIREWICPSCNETHDRDINASINILKEGLRLITIQNK

SEQ ID NO: 48 - protein, 372 aa, Clostridioides difficile
VIAVEKAYKFRMYPNKKQQELINKTFGCCRFVYNKYLAKRIDVYKNDKETFTYKQCSSDLTNLKKELNWLKEPDKFSLQNALKDLDNAYKKFFKEKAGFPKFKSKKINRFSYKTNFTNGNIMYCGQHIKLPKLGMVKIRDKQVPQGRILNATISKEPSGRYYVSLCCTDVDIEAFENTNNQIGLDLGIKEFCISSCGEFIENPKYLKKSLNKLAKLQRELSRKTIGSLNRNKARLKVARFQEHIANQRNDFLQKLSTKLIKENDIICIEDLQVKNMIRNRKLSRLISDVSWSEFIRQLEYKANWYGRQIVKVGKFFASSQICNKCGYKNEEVKDLNIREWICPSCNETHDRDINASINILKEGLRLITIQNK

SEQ ID NO: 49 - protein, 372 aa, Clostridioides difficile
VIVVEKAYKFRMYPNKKQQELINKTFGCCRFVYNKYLAKRIDVYKNDKETFTYKQCSSDLTNLKKELNWLKEPDKFSLQNALKDLDNAYKKFFKEKAGFPKFKSKKINRFSYKTNFTNGNIMYCGQHIKLPKLGMVKVRDKQVPKGRILNATISKEPSGRYYVSLCCTDVDIEVFENTNNHIGLDLGIKEFCISSCGEFIENPKYLKKSLNKLAKLQRELSRKTIGSLNRNKTRLKVARLQEHIANQRNDFLQKLSTKLIKENDIICIEDLQVKNMIRNRKLSRLISDVSWSEFIRQLEYKANWHGRQIVKVGKFFASSQICNKCGYKNEEVKDLNIREWICPSCNETHDRDINASRNILKEGLRLITIQNK

SEQ ID NO: 50 - protein, 372 aa, Clostridioides difficile
VIVVEKAYKFRMYPNKKQQELINKTFGCCRFVYNKYLAKRIEVYKNDKETFTYKQCSSDLTNLKKELKWLKEPDKFSLQNALKDLDNAYKKFFKEKAGFPKFKSKKINRFSYKTNFTNGNIMYCGQHIKLPKLGMVKIRDKQVPKGRILNATISKEPSGRYYVSLCCTDVDIEAFENTNNQIGLDLGIKEFCISSCGEFIENPKYLKKSLSKLAKLQRELSRKTIGSLNRNKARLKVARLQEHIANQRNDFLQKLSTKLIKENDIICIEDLQVKNMIRNRKLSRLISDVSWSEFIRQLKYKANWHGRQIVKVGKFFASSQICNKCGYKNEEVKDLNIREWICPSCNETHDRDINASINILKEGLRLITIQNK

SEQ ID NO: 51 - RNA, 176 nt, synthetic construct
  source 1..176: mol_type = other RNA
agataatgttaatatgtaggattcgttgtatccgaatttaagcctttggactgtcatatcaaatgagagtagcaaatgaatttattcattgcaaaatcagacagggtgaataaggaattaaacaagatttatagatttttataaatttttggcaacggtgatagggatgtttagtg

SEQ ID NO: 52 - RNA, 154 nt, synthetic construct
  source 1..154: mol_type = other RNA
gaggtgtaccatgcgttgtatgggaagttaagcccttggagtgttatatcaaaccaaagtagctcttagcaaaatgggacacgttgaatagggaattaaacaagctttataaagttttataatgttttggcaacgggataagaataacatgaga

SEQ ID NO: 53 - RNA, 164 nt, synthetic construct
  source 1..164: mol_type = other RNA
tagatacttatatatgtaccgttggctagatgggaatttaagcctgtggagtgctatataaactaaagtagcttcggcaaaatggagtacattgaaacaggaaaaatctcaatatgggtatttttgtccatattttgagtagcagatgtattaccaagtgaaat

SEQ ID NO: 54 - RNA, 163 nt, synthetic construct
  source 1..163: mol_type = other RNA
agatacttatatatgtaccgttggctaaatgggaatttaagcctgtggagtgctatataaaccaaagtagcttcggcaaaatggagtacattgaaacaggaaaaatctcaatatgggtatttttgtccatattttgagtagcagtgttgaaaatgaaaaaagt

SEQ ID NO: 55 - RNA, 165 nt, synthetic construct
  source 1..165: mol_type = other RNA
tagatacttatatatgtaccgttggctagatgggaatttaggcctgtggagtgctatataaaccaaagtagcttcggaaaaatggagtacattgaaacaggaaaaatctcaatatgggtatttttgtccatattttgagtagcagtaagtttaatgaagaagaaa

SEQ ID NO: 56 - RNA, 176 nt, synthetic construct
  source 1..176: mol_type = other RNA
agataatgttaatatgtaggattcgttgtatccgaatttaagcctttggactgtcatatcaaatgagagtagcaaatgaatttattcattgcaaaatcagacagggtgaataaggaattaaacaagatttatatatttttatagatttttggcaacggtgttaatattgtttgatt

SEQ ID NO: 57 - RNA, 165 nt, synthetic construct
  source 1..165: mol_type = other RNA
tagatacttatatatgtaccgttggctaaatgggaatttaagcctgtggagtgctatataaaccaaagtagcttcggcaaaatggagtacattgaaacaggaaaaatctcaatatgggtatttttgtccatattttgagtagcaggaaaaaattatgtatgatgt

SEQ ID NO: 58 - DNA, 601 bp, synthetic construct
  source 1..601: mol_type = other DNA
taattaaactgttataacaaatctaaacaaaactatacaaatatgtatagaaaaatagatttataacaggaagccctgtgtatcatgtgaatggtgcatactcggtgttaattgcttttaactcctaaagccttacaaccaaagcgaagttggaaacgacaagcgtaacggtgcgaaagctgaaaaaatagtaaggatggcataagctgaaataaaatccaattaggttctataaaagggtggtcgtgacatatagaaaacgttgggtgctaaatgctgtaataatggatgtttagcagggaaattcctaagtcttttaagatatggaagaccttcaacgactatctccttgagggagagtaaagccacaagccaacggtggaagaaaaataccgcatctcttttgagatgaagatatagtctacgctcatatgaaagtatgagaggtctactcgtgagagaaagactgctataggtgttgcgacctatagtgaataagaaaaatatatacaaatataaaaaatattgacatatctctctaaaaagtgtaatatattattatactaaagggaggtgagtacgtatatatttttcgtatcgg

SEQ ID NO: 59 - DNA, 597 bp, synthetic construct
  source 1..597: mol_type = other DNA
taattaaactgttataacaaatctaaacaaaactatacaaatatgtatagaaaaatagatttataacaggaagccctgtgtatcatgtgaatggtgcatactcggtgttaattgcttttaactcctaaagccttacaaccaaagcgaagttggaaacgacaagcgtaacggtgcgaaagctgaaaaaatagtaaggatggcataagctgaaataaaatccaattaggttctataaaagggtggtcgtgacatatagaaaacgttgggtgctaaatgctgtaataatggatgtttagcagggaaattcctaagtcttttaagatatggaagaccttcaacgactatctccttgagggagagtaaagccacaagccaacggtggaagaaaaataccgcatctcttttgagatgaagatatagtctacgctcatatgaaagtatgagaggtctactcgtgagagaaagactgctataggtgttgcgacctatagtgaataagaaaaatatatacaaatataaaaaatattgacatatctctctaaaaagtgtaatatattattatactaaagggaggtgagtacatatttttcgtatcgg

SEQ ID NO: 60 - DNA, 920 bp, synthetic construct
  source 1..920: mol_type = other DNA
taattaaactgttataacaaatctaaacaaaactatacaaatatgtatagaaaaatagatatcccagcggtcaaaacaggcggcagtaaggcggtcgggatagttttcttgcggccctaatccgagccagtttacccgctctgctacctgcgccagctggcagttcaggccaatccgcgccggatgcggtgtatcgctcgccacttcaacatcaacggtaatcgccatttgaccactaccatcaatccggtaggttttccggctgataaataaggttttcccctgatgctgccacgcgtgagcggtcgtaatcagcaccgcatcagcaagtgtatctgccgtgcactgcaacaacgctgcttcggcctggtaatggcccgccgccttccagcgttcgacccaggcgttagggtcaatgcgggtcgcttcacttacgccaatgtcgttatccagcggtgcacgggtgaactgatcgcgcagcggcgtcagcagttgttttttatcgccaatccacatctgtgaaagaaagcctgactggcggttaaattgccaacgcttattacccagctcgatgcaaaaatccatttcgctggtggtcagatgcgggatggcgtgggacgcggcggggagcgtcacactgaggttttccgccagacgccactgctgccaggcgctgatgtgcccggcttctgaccatgcggtcgcgttcggttgcactacgcgtactgtgagccagagttgcccggcgctctccggctgcggtagttcaggcagttcaatcaactgtttaccttgtggagcgacatccagaggcacttcaccgcttgccagcggcttaccatccagcgccaccatccagtagtcgtgtcatagtataaatgtctacatttaaatagaaatgtatatatttttcgtatcgg

SEQ ID NO: 61 - DNA, 581 bp, synthetic construct
  source 1..581: mol_type = other DNA
taattaaactgttataacaaatctaaacaaaactatacaaatatgtatagaaaaatagatttataacaggaagccctgtgtatcatgtgaatggtgcatactcggtgttaattgcttttaactcctaaagccttacaaccaaagcgaagttggaaacgacaagcgtaacggtgcgaaagctgaaaaaatagtaaggatggcataagctgaaataaaatccaattaggttctataaaagggtggtcgtgacatatagaaaacgttgggtgctaaatgctgtaataatggatgtttagcagggaaattcctaagtcttttaagatatggaagaccttcaacgactatctccttgagggagagtaaagccacaagccaacggtggaagaaaaataccgcatctcttttgagatgaagatatagtctacgctcatatgaaagtatgagaggtctactcgtgagagaaagactgctataggtgttgcgacctatagtgaataagaaaaatatatacaaatataaaaaatattgacatatctctctaaaaagtgtaatatattattatactaaagggaggtgagtac

SEQ ID NO: 62 - DNA, 581 bp, synthetic construct; identical to SEQ ID NO: 61
  source 1..581: mol_type = other DNA

SEQ ID NO: 63 - DNA, 60 bp, synthetic construct
  source 1..60: mol_type = other DNA
taattaaactgttataacaaatctaaacaaaactatacaaatatgtatagaaaaatagat

SEQ ID NO: 64 - DNA, 20 bp, synthetic construct
  source 1..20: mol_type = other DNA
gtatatatttttcgtatcgg

SEQ ID NO: 65 - DNA, 16 bp, synthetic construct
  source 1..16: mol_type = other DNA
atatttttcgtatcgg

SEQ ID NO: 66 - DNA, 60 bp, synthetic construct
  source 1..60: mol_type = other DNA
agtcgtgtcatagtataaatgtctacatttaaatagaaatgtatatatttttcgtatcgg

SEQ ID NO: 67 - DNA, 2008 bp, synthetic construct
  source 1..2008: mol_type = other DNA
tttgtttatttttctaaatacattcaaatatgtatccgctcatgagacaataaccctgataaatgcttcaataatattgaaaaaggaagagtatgagccatattcaacgggaaacgtcttgctctaggccgcgattaaattccaacatggatgctgatttatatgggtataaatgggctcgcgataatgtcgggcaatcaggtgcgacaatctatcgattgtatgggaagcccgatgcgccagagttgtttctgaaacatggcaaaggtagcgttgccaatgatgttacagatgagatggtcagactaaactggctgacggaatttatgcctcttccgaccatcaagcattttatccgtactcctgatgatgcatggttactcaccactgcgatccccgggaaaacagcattccaggtattagaagaatatcctgattcaggtgaaaatattgttgatgcgctggcagtgttcctgcgccggttgcattcgattcctgtttgtaattgtccttttaacagcgaccgcgtatttcgtctcgctcaggcgcaatcacgaatgaataacggtttggttgatgcgagtgattttgatgacgagcgtaatggctggcctgttgaacaagtctggaaagaaatgcataaacttttgccattctcaccggattcagtcgtcactcatggtgatttctcacttgataaccttatttttgacgaggggaaattaataggttgtattgatgttggacgagtcggaatcgcagaccgataccaggatcttgccatcctatggaactgcctcggtgagttttctccttcattacagaaacggctttttcaaaaatatggtattgataatcctgatatgaataaattgcagtttcatttgatgctcgatgagtttttctaagaattaattcatgagcggatacatatttgaatgtatttagaaaaataaacaaataggggttccgcgcacatttccccgaaaagtgccacttgcggagacccggtcgtcagcttgtcgtcggttcagggcagggtcgttaaatagccgcttatgtctattgctggtttaagcttaccggtgcggagccgttgcaacaagggcgcttgtgtgtagggaagnnnnnnggacaagtggttcaccatgcgttgctttatggtatgataggttagggatccctcactcattaggcaccgggatctcgaccgatgcccttgagagccttcaacccagtcagctccttccggtgggcgcggggcatgactaacatgagaattacaacttatatcgtatggggctgacttcaggtgctacatttgaagagataaattgcactgaaatctagagtgatggtgtcgggaatccgtaaaggatcttcttgagatccttttacgatcgtcgtaatctcctgctctgtaaacgaaaaaaccgcctggggaggcggtttgatcgaaggttaagtcagttggggaactgcttaacctggtaactggctttagtggagcgcagataccaaatactgtcctttcagtgtagcctctgttaggccaccacttcaagactctcgatatctaaatccactaattctcagttaccaatggctgctgccagtggcgttttgtcgtgtctttccgggttggactcaagatgatagttaccggataaggcgcagcagtcgggctgaacggggggttcttgcacacagcccagcttggagcgaactgtctacacggaacgggacgtggtgatttgggtaaagcctccaccacaacacggacgccgcaggacgggaacaggagagcgcaagagggagccatcagggggaaacgcctggtatctttatagtcctgtcgggtttcgccaccactgatttgagcgtcagatttcgtgatgttcgtcaggggggcggagcctatggaaaaacggcttcgctccggccttattgtctctctgctaagtatcctcctggcatcttctaggacgtttctgcgctagcatgccta

SEQ ID NO: 68 - DNA, 4932 bp, synthetic construct
  source 1..4932: mol_type = other DNA
agttccccaactgacttaaccttcgatcaaaccacctccccaggtggttttttcgtttacagggcaaaagattacgcgcagaaaaaaaggatctcaagaagatcctttgatcttttctactgaaccgctctagatttcagtgcaatttatctcttcaaatgtagcacctgaagtcagccccatacgatataagttgtaattctcatgttagtcatgccccgcgcccaccggaaggagctgactgggttgaaggctctcaagggcatcggtcgagatcccggtgcctaatgagtgagctaacttacattaattgcgttgcgctcactgcccgctttccagtcgggaaacctgtcgtgccagctgcattaatgaatcggccaacgcgcggggagaggcggtttgcgtattgggcgccagggtggtttttcttttcaccagtgagacgggcaacagctgattgcccttcaccgcctggccctgagagagttgcagcaagcggtccacgctggtttgccccagcaggcgaaaatcctgtttgatggtggttaacggcgggatataacatgagctgtcttcggtatcgtcgtatcccactaccgagatgtccgcaccaacgcgcagcccggactcggtaatggcgcgcattgcgcccagcgccatctgatcgttggcaaccagcatcgcagtgggaacgatgccctcattcagcatttgcatggtttgttgaaaaccggacatggcactccagtcgccttcccgttccgctatcggctgaatttgattgcgagtgagatatttatgccagccagccagacgcagacgcgccgagacagaacttaatgggcccgctaacagcgcgatttgctggtgacccaatgcgaccagatgctccacgcccagtcgcgtaccgtcttcatgggagaaaataatactgttgatgggtgtctggtcagagacatcaagaaataacgccggaacattagtgcaggcagcttccacagcaatggcatcctggtcatccagcggatagttaatgatcagcccactgacgcgttgcgcgagaagattgtgcaccgccgctttacaggcttcgacgccgcttcgttctaccatcgacaccaccacgctggcacccagttgatcggcgcgagatttaatcgccgcgacaatttgcgacggcgcgtgcagggccagactggaggtggcaacgccaatcagcaacgactgtttgcccgccagttgttgtgccacgcggttgggaatgtaattcagctccgccatcgccgcttccactttttcccgcgttttcgcagaaacgtggctggcctggttcaccacgcgggaaacggtctgataagagacaccggcatactctgcgacatcgtataacgttactggtttcacattcaccaccctgaattgactctcttccgggcgctatcatgccataccgcgaaaggttttgcgccattcgatggtgtccgggattgacagctagctcagtcctaggtataatgctagcgtggagatatacctcgagaattaccaaattcaaagtgcttaacctaaactaagctttgaatatgtacgtaacgatactacggaatttaagcctgttaagagtcatatcaaatggtagtagctttggcaaacccagattcgttgaagcaggaagacacaagacgaaaatcataagacataagtcgtgtcatagtataaatgtctacatttaaatagaaatgtatatatttttcgtatcggttgtgaatttttagccaataaatttaatggtgaaaaaggctcgcggccgcaataactagcataaccccttggggcctctaaacgggtcttgaggggttttttgctgaacgtacgttttacggctagctcagtcctaggtactatgctagcgtggagatatacggtaccaaggagatataccatgggcattgtcgcgattaagatcaagctgaagccaacaaaagaacaagaggtgcttttctggaaatccgcaggagttgctcgctggtcctacaactactttctttcggaatctgagcgtcattatcaagagtatttagagggtaaacaagacaaaaaaaccattaaagaaagtgaggtccgcaaatatattaataacgtccttaaaaaaacgacacatacctggcttgaggaagttggttctaacgtgatgaaacaggccgtaaaagacgctgacatcgctcgtaaacgttggtttgacggagtagcgaacaagcccaagttcaagtcgaaacgcaaatcaaaggtctccttttacgtgaactacgagtctctgaagcgcacgaataatggctttcgcggagagaagattggcgtcgtgaagacgtatcaagcccttcctaaacttaagaaaggtgagaaatacagcaaccctcgcatctcctttgatgggatgaattggttcatcagcattgggtacaataacgagtttaaggccgtgaaattgacggacgtcagtcttggcattgacgtagggattaaggaattagcggtttgtagtgatgggcaattcaaaaaaaatatcaataagactaaacgcgtacgttttcttgaaaaaaagcttaagcgcgaacagcgcaagatctctcacaagctggaagctaacattaaaagttatgataagaaccgcaaacccatctacaaacgccccttgcgtgatatgaagaacattcagaagcagaatcgtatcatccgtaacttgtataagaaactggaaaacattcgtactaactacctgcatcaatgttctaatgaaattgtgaaaaccaagccctctcgtattgttatggaaacgttgaatattaagggcatgatgaaaaataagcatctgtccaaggcgattgccaatcaaaaattgtatgaatttaaacgccagattcaatacaagtgtaaaaaatatggaattaaattcgtagaagctgacaaatggtatccctcatctaaaacctgttcgtgctgtggtcaggtcaaatccgacctgaagcttaaagaccgtctttatgtttgcaactgcggccttaagatggatcgcgatttaaacgcatcgatcaacttagcgaactaccaaatccaaagtgcgtaataagaattcctgctgccaccgctgagcaataactagcataaccccttggggcctctaaacgggtcttgaggggttttttgctgaaacctcaggcatttgagaagcacacggtcacactgcttccggtagtcaataaaccggtaaaccagcaatagacataagcggctatttaacgaccctgccctgaaccgacgaccgggtcatcgtggccggatcttgcggcccctcggcttgaacgaattgttagacattatttgccgactaccttggtgatctcgcctttcacgtagtggacaaattcttccaactgatctgcgcgcgaggccaagcgatcttcttcttgtccaagataagcctgtctagcttcaagtatgacgggctgatactgggccggcaggcgctccattgcccagtcggcagcgacatccttcggcgcgattttgccggttactgcgctgtaccaaatgcgggacaacgtaagcactacatttcgctcatcgccagcccagtcgggcggcgagttccatagcgttaaggtttcatttagcgcctcaaatagatcctgttcaggaaccggatcaaagagttcctccgccgctggacctaccaaggcaacgctatgttctcttgcttttgtcagcaagatagccagatcaatgtcgatcgtggctggctcgaagatacctgcaagaatgtcattgcgctgccattctccaaattgcagttcgcgcttagctggataacgccacggaatgatgtcgtcgtgcacaacaatggtgacttctacagcgcggagaatctcgctctctccaggggaagccgaagtttccaaaaggtcgttgatcaaagctcgccgcgttgtttcatcaagccttacggtcaccgtaaccagcaaatcaatatcactgtgtggcttcaggccgccatccactgcggagccgtacaaatgtacggccagcaacgtcggttcgagatggcgctcgatgacgccaactacctctgatagttgagtcgatacttcggcgatcaccgcttccctcatactcttcctttttcaatattattgaagcatttatcagggttattgtctcatgagcggatacatatttgaatgtatttagaaaaataaacaaatagctagctcactcggtcgctacgctccgggcgtgagactgcggcgggcgctgcggacacatacaaagttacccacagattccgtggataagcaggggactaacatgtgaggcaaaacagcagggccgcgccggtggcgtttttccataggctccgccctcctgccagagttcacataaacagacgcttttccggtgcatctgtgggagccgtgaggctcaaccatgaatctgacagtacgggcgaaacccgacaggacttaaagatccccaccgtttccggcgggtcgctccctcttgcgctctcctgttccgaccctgccgtttaccggatacctgttccgcctttctcccttacgggaagtgtggcgctttctcatagctcacacactggtatctcggctcggtgtaggtcgttcgctccaagctgggctgtaagcaagaactccccgttcagcccgactgctgcgccttatccggtaactgttcacttgagtccaacccggaaaagcacggtaaaacgccactggcagcagccattggtaactgggagttcgcagaggatttgtttagctaaacacgcggttgctcttgaagtgtgcgccaaagtccggctacactggaaggacagatttggttgctgtgctctgcgaaagccagttaccacggttaagc

SEQ ID NO: 69 - DNA, 4932 bp, synthetic construct
  source 1..4932: mol_type = other DNA
ctggctcgaagatacctgcaagaatgtcattgcgctgccattctccaaattgcagttcgcgcttagctggataacgccacggaatgatgtcgtcgtgcacaacaatggtgacttctacagcgcggagaatctcgctctctccaggggaagccgaagtttccaaaaggtcgttgatcaaagctcgccgcgttgtttcatcaagccttacggtcaccgtaaccagcaaatcaatatcactgtgtggcttcaggccgccatccactgcggagccgtacaaatgtacggccagcaacgtcggttcgagatggcgctcgatgacgccaactacctctgatagttgagtcgatacttcggcgatcaccgcttccctcatactcttcctttttcaatattattgaagcatttatcagggttattgtctcatgagcggatacatatttgaatgtatttagaaaaataaacaaatagctagctcactcggtcgctacgctccgggcgtgagactgcggcgggcgctgcggacacatacaaagttacccacagattccgtggataagcaggggactaacatgtgaggcaaaacagcagggccgcgccggtggcgtttttccataggctccgccctcctgccagagttcacataaacagacgcttttccggtgcatctgtgggagccgtgaggctcaaccatgaatctgacagtacgggcgaaacccgacaggacttaaagatccccaccgtttccggcgggtcgctccctcttgcgctctcctgttccgaccctgccgtttaccggatacctgttccgcctttctcccttacgggaagtgtggcgctttctcatagctcacacactggtatctcggctcggtgtaggtcgttcgctccaagctgggctgtaagcaagaactccccgttcagcccgactgctgcgccttatccggtaactgttcacttgagtccaacccggaaaagcacggtaaaacgccactggcagcagccattggtaactgggagttcgcagaggatttgtttagctaaacacgcggttgctcttgaagtgtgcgccaaagtccggctacactggaaggacagatttggttgctgtgctctgcgaaagccagttaccacggttaagcagttccccaactgacttaaccttcgatcaaaccacctccccaggtggttttttcgtttacagggcaaaagattacgcgcagaaaaaaaggatctcaagaagatcctttgatcttttctactgaaccgctctagatttcagtgcaatttatctcttcaaatgtagcacctgaagtcagccccatacgatataagttgtaattctcatgttagtcatgccccgcgcccaccggaaggagctgactgggttgaaggctctcaagggcatcggtcgagatcccggtgcctaatgagtgagctaacttacattaattgcgttgcgctcactgcccgctttccagtcgggaaacctgtcgtgccagctgcattaatgaatcggccaacgcgcggggagaggcggtttgcgtattgggcgccagggtggtttttcttttcaccagtgagacgggcaacagctgattgcccttcaccgcctggccctgagagagttgcagcaagcggtccacgctggtttgccccagcaggcgaaaatcctgtttgatggtggttaacggcgggatataacatgagctgtcttcggtatcgtcgtatcccactaccgagatgtccgcaccaacgcgcagcccggactcggtaatggcgcgcattgcgcccagcgccatctgatcgttggcaaccagcatcgcagtgggaacgatgccctcattcagcatttgcatggtttgttgaaaaccggacatggcactccagtcgccttcccgttccgctatcggctgaatttgattgcgagtgagatatttatgccagccagccagacgcagacgcgccgagacagaacttaatgggcccgctaacagcgcgatttgctggtgacccaatgcgaccagatgctccacgcccagtcgcgtaccgtcttcatgggagaaaataatactgttgatgggtgtctggtcagagacatcaagaaataacgccggaacattagtgcaggcagcttccacagcaatggcatcctggtcatccagcggatagttaatgatcagcccactgacgcgttgcgcgagaagattgtgcaccgccgctttacaggcttcgacgccgcttcgttctaccatcgacaccaccacgctggcacccagttgatcggcgcgagatttaatcgccgcgacaatttgcgacggcgcgtgcagggccagactggaggtggcaacgccaatcagcaacgactgtttgcccgccagttgttgtgccacgcggttgggaatgtaattcagctccgccatcgccgcttccactttttcccgcgttttcgcagaaacgtggctggcctggttcaccacgcgggaaacggtctgataagagacaccggcatactctgcgacatcgtataacgttactggtttcacattcaccaccctgaattgactctcttccgggcgctatcatgccataccgcgaaaggttttgcgccattcgatggtgtccgggattgacagctagctcagtcctaggtataatgctagcgtggagatatacctcgagaattaccaaattcaaagtgcttaacctaaactaagctttgaatatgtacgtaacgatactacggaatttaagcctgttaagagtcatatcaaatggtagtagctttggcaaacccagattcgttgaagcaggaagacacaagacgaaaatcataagacataagtcgtgtcatagtataaatgtctacatttaaatagaaatgtatatatttttcgtatcgggacaagtggttcaccatgcgttgctttatggtatgatagctcgcggccgcaataactagcataaccccttggggcctctaaacgggtcttgaggggttttttgctgaacgtacgttttacggctagctcagtcctaggtactatgctagcgtggagatatacggtaccaaggagatataccatgggcattgtcgcgattaagatcaagctgaagccaacaaaagaacaagaggtgcttttctggaaatccgcaggagttgctcgctggtcctacaactactttctttcggaatctgagcgtcattatcaagagtatttagagggtaaacaagacaaaaaaaccattaaagaaagtgaggtccgcaaatatattaataacgtccttaaaaaaacgacacatacctggcttgaggaagttggttctaacgtgatgaaacaggccgtaaaagacgctgacatcgctcgtaaacgttggtttgacggagtagcgaacaagcccaagttcaagtcgaaacgcaaatcaaaggtctccttttacgtgaactacgagtctctgaagcgcacgaataatggctttcgcggagagaagattggcgtcgtgaagacgtatcaagcccttcctaaacttaagaaaggtgagaaatacagcaaccctcgcatctcctttgatgggatgaattggttcatcagcattgggtacaataacgagtttaaggccgtgaaattgacggacgtcagtcttggcattgacgtagggattaaggaattagcggtttgtagtgatgggcaattcaaaaaaaatatcaataagactaaacgcgtacgttttcttgaaaaaaagcttaagcgcgaacagcgcaagatctctcacaagctggaagctaacattaaaagttatgataagaaccgcaaacccatctacaaacgccccttgcgtgatatgaagaacattcagaagcagaatcgtatcatccgtaacttgtataagaaactggaaaacattcgtactaactacctgcatcaatgttctaatgaaattgtgaaaaccaagccctctcgtattgttatggaaacgttgaatattaagggcatgatgaaaaataagcatctgtccaaggcgattgccaatcaaaaattgtatgaatttaaacgccagattcaatacaagtgtaaaaaatatggaattaaattcgtagaagctgacaaatggtatccctcatctaaaacctgttcgtgctgtggtcaggtcaaatccgacctgaagcttaaagaccgtctttatgtttgcaactgcggccttaagatggatcgcgatttaaacgcatcgatcaacttagcgaactaccaaatccaaagtgcgtaataagaattcctgctgccaccgctgagcaataactagcataaccccttggggcctctaaacgggtcttgaggggttttttgctgaaacctcaggcatttgagaagcacacggtcacactgcttccggtagtcaataaaccggtaaaccagcaatagacataagcggctatttaacgaccctgccctgaaccgacgaccgggtcatcgtggccggatcttgcggcccctcggcttgaacgaattgttagacattatttgccgactaccttggtgatctcgcctttcacgtagtggacaaattcttccaactgatctgcgcgcgaggccaagcgatcttcttcttgtccaagataagcctgtctagcttcaagtatgacgggctgatactgggccggcaggcgctccattgcccagtcggcagcgacatccttcggcgcgattttgccggttactgcgctgtaccaaatgcgggacaacgtaagcactacatttcgctcatcgccagcccagtcgggcggcgagttccatagcgttaaggtttcatttagcgcctcaaatagatcctgttcaggaaccggatcaaagagttcctccgccgctggacctaccaaggcaacgctatgttctcttgcttttgtcagcaagatagccagatcaatgtcgatcgtgg

SEQ ID NO: 70 - DNA, 4932 bp, synthetic construct
  source 1..4932: mol_type = other DNA
ctggctcgaagatacctgcaagaatgtcattgcgctgccattctccaaattgcagttcgcgcttagctggataacgccacggaatgatgtcgtcgtgcacaacaatggtgacttctacagcgcggagaatctcgctctctccaggggaagccgaagtttccaaaaggtcgttgatcaaagctcgccgcgttgtttcatcaagccttacggtcaccgtaaccagcaaatcaatatcactgtgtggcttcaggccgccatccactgcggagccgtacaaatgtacggccagcaacgtcggttcgagatggcgctcgatgacgccaactacctctgatagttgagtcgatacttcggcgatcaccgcttccctcatactcttcctttttcaatattattgaagcatttatcagggttattgtctcatgagcggatacatatttgaatgtatttagaaaaataaacaaatagctagctcactcggtcgctacgctccgggcgtgagactgcggcgggcgctgcggacacatacaaagttacccacagattccgtggataagcaggggactaacatgtgaggcaaaacagcagggccgcgccggtggcgtttttccataggctccgccctcctgccagagttcacataaacagacgcttttccggtgcatctgtgggagccgtgaggctcaaccatgaatctgacagtacgggcgaaacccgacaggacttaaagatccccaccgtttccggcgggtcgctccctcttgcgctctcctgttccgaccctgccgtttaccggatacctgttccgcctttctcccttacgggaagtgtggcgctttctcatagctcacacactggtatctcggctcggtgtaggtcgttcgctccaagctgggctgtaagcaagaactccccgttcagcccgactgctgcgccttatccggtaactgttcacttgagtccaacccggaaaagcacggtaaaacgccactggcagcagccattggtaactgggagttcgcagaggatttgtttagctaaacacgcggttgctcttgaagtgtgcgccaaagtccggctacactggaaggacagatttggttgctgtgctctgcgaaagccagttaccacggttaagcagttccccaactgacttaaccttcgatcaaaccacctccccaggtggttttttcgtttacagggcaaaagattacgcgcagaaaaaaaggatctcaagaagatcctttgatcttttctactgaaccgctctagatttcagtgcaatttatctcttcaaatgtagcacctgaagtcagccccatacgatataagttgtaattctcatgttagtcatgccccgcgcccaccggaaggagctgactgggttgaaggctctcaagggcatcggtcgagatcccggtgcctaatgagtgagctaacttacattaattgcgttgcgctcactgcccgctttccagtcgggaaacctgtcgtgccagctgcattaatgaatcggccaacgcgcggggagaggcggtttgcgtattgggcgccagggtggtttttcttttcaccagtgagacgggcaacagctgattgcccttcaccgcctggccctgagagagttgcagcaagcggtccacgctggtttgccccagcaggcgaaaatcctgtttgatggtggttaacggcgggatataacatgagctgtcttcggtatcgtcgtatcccactaccgagatgtccgcaccaacgcgcagcccggactcggtaatggcgcgcattgcgcccagcgccatctgatcgttggcaaccagcatcgcagtgggaacgatgccctcattcagcatttgcatggtttgttgaaaaccggacatggcactccagtcgccttcccgttccgctatcggctgaatttgattgcgagtgagatatttatgccagccagccagacgcagacgcgccgagacagaacttaatgggcccgctaacagcgcgatttgctggtgacccaatgcgaccagatgctccacgcccagtcgcgtaccgtcttcatgggagaaaataatactgttgatgggtgtctggtcagagacatcaagaaataacgccggaacattagtgcaggcagcttccacagcaatggcatcctggtcatccagcggatagttaatgatcagcccactgacgcgttgcgcgagaagattgtgcaccgccgctttacaggcttcgacgccgcttcgttctaccatcgacaccaccacgctggcacccagttgatcggcgcgagatttaatcgccgcgacaatttgcgacggcgcgtgcagggccagactggaggtggcaacgccaatcagcaacgactgtttgcccgccagttgttgtgccacgcggttgggaatgtaattcagctccgccatcgccgcttccactttttcccgcgttttcgcagaaacgtggctggcctggttcaccacgcgggaaacggtctgataagagacaccggcatactctgcgacatcgtataacgttactggtttcacattcaccaccctgaattgactctcttccgggcgctatcatgccataccgcgaaaggttttgcgccattcgatggtgtccgggattgacagctagctcagtcctaggtataatgctagcgtggagatatacctcgagaattaccaaattcaaagtgcttaacctaaactaagctttgaatatgtacgtaacgatactacggaatttaagcctgttaagagtcatatcaaatggtagtagctttggcaaacccagattcgttgaagcaggaagacacaagacgaaaatcataagacataagtcgtgtcatagtataaatgtctacatttaaatagaaatgtatatatttttcgtatcggttgtgaatttttagccaataaatttaatggtgaaaaaggctcgcggccgcaataactagcataaccccttggggcctctaaacgggtcttgaggggttttttgctgaacgtacgttttacggctagctcagtcctaggtactatgctagcgtggagatatacggtaccaaggagatataccatgggcattgtcgcgattaagatcaagctgaagccaacaaaagaacaagaggtgcttttctggaaatccgcaggagttgctcgctggtcctacaactactttctttcggaatctgagcgtcattatcaagagtatttagagggtaaacaagacaaaaaaaccattaaagaaagtgaggtccgcaaatatattaataacgtccttaaaaaaacgacacatacctggcttgaggaagttggttctaacgtgatgaaacaggccgtaaaagacgctgacatcgctcgtaaacgttggtttgacggagtagcgaacaagcccaagttcaagtcgaaacgcaaatcaaaggtctccttttacgtgaactacgagtctctgaagcgcacgaataatggctttcgcggagagaagattggcgtcgtgaagacgtatcaagcccttcctaaacttaagaaaggtgagaaatacagcaaccctcgcatctcctttgatgggatgaattggttcatcagcattgggtacaataacgagtttaaggccgtgaaattgacggacgtcagtcttggcattgccgtagggattaaggaattagcggtttgtagtgatgggcaattcaaaaaaaatatcaataagactaaacgcgtacgttttcttgaaaaaaagcttaagcgcgaacagcgcaagatctctcacaagctggaagctaacattaaaagttatgataagaaccgcaaacccatctacaaacgccccttgcgtgatatgaagaacattcagaagcagaatcgtatcatccgtaacttgtataagaaactggaaaacattcgtactaactacctgcatcaatgttctaatgaaattgtgaaaaccaagccctctcgtattgttatggaaacgttgaatattaagggcatgatgaaaaataagcatctgtccaaggcgattgccaatcaaaaattgtatgaatttaaacgccagattcaatacaagtgtaaaaaatatggaattaaattcgtagaagctgacaaatggtatccctcatctaaaacctgttcgtgctgtggtcaggtcaaatccgacctgaagcttaaagaccgtctttatgtttgcaactgcggccttaagatggatcgcgatttaaacgcatcgatcaacttagcgaactaccaaatccaaagtgcgtaataagaattcctgctgccaccgctgagcaataactagcataaccccttggggcctctaaacgggtcttgaggggttttttgctgaaacctcaggcatttgagaagcacacggtcacactgcttccggtagtcaataaaccggtaaaccagcaatagacataagcggctatttaacgaccctgccctgaaccgacgaccgggtcatcgtggccggatcttgcggcccctcggcttgaacgaattgttagacattatttgccgactaccttggtgatctcgcctttcacgtagtggacaaattcttccaactgatctgcgcgcgaggccaagcgatcttcttcttgtccaagataagcctgtctagcttcaagtatgacgggctgatactgggccggcaggcgctccattgcccagtcggcagcgacatccttcggcgcgattttgccggttactgcgctgtaccaaatgcgggacaacgtaagcactacatttcgctcatcgccagcccagtcgggcggcgagttccatagcgttaaggtttcatttagcgcctcaaatagatcctgttcaggaaccggatcaaagagttcctccgccgctggacctaccaaggcaacgctatgttctcttgcttttgtcagcaagatagccagatcaatgtcgatcgtgg

SEQ ID NO: 71 - DNA, 1954 bp, synthetic construct
  source 1..1954: mol_type = other DNA
tttgtttatttttctaaatacattcaaatatgtatccgctcatgagacaataaccctgataaatgcttcaataatattgaaaaaggaagagtatgagccatattcaacgggaaacgtcttgctctaggccgcgattaaattccaacatggatgctgatttatatgggtataaatgggctcgcgataatgtcgggcaatcaggtgcgacaatctatcgattgtatgggaagcccgatgcgccagagttgtttctgaaacatggcaaaggtagcgttgccaatgatgttacagatgagatggtcagactaaactggctgacggaatttatgcctcttccgaccatcaagcattttatccgtactcctgatgatgcatggttactcaccactgcgatccccgggaaaacagcattccaggtattagaagaatatcctgattcaggtgaaaatattgttgatgcgctggcagtgttcctgcgccggttgcattcgattcctgtttgtaattgtccttttaacagcgaccgcgtatttcgtctcgctcaggcgcaatcacgaatgaataacggtttggttgatgcgagtgattttgatgacgagcgtaatggctggcctgttgaacaagtctggaaagaaatgcataaacttttgccattctcaccggattcagtcgtcactcatggtgatttctcacttgataaccttatttttgacgaggggaaattaataggttgtattgatgttggacgagtcggaatcgcagaccgataccaggatcttgccatcctatggaactgcctcggtgagttttctccttcattacagaaacggctttttcaaaaatatggtattgataatcctgatatgaataaattgcagtttcatttgatgctcgatgagtttttctaagaattaattcatgagcggatacatatttgaatgtatttagaaaaataaacaaataggggttccgcgcacatttccccgaaaagtgccacttgcggagacccggtcgtcagcttgtcgtcggttcagggcagggtcgttaaatagccgcttatgtctattgctggtttaccggtgggttgtgaatttttagccaataaatttaatggtgaaaaaggagttagctcactcattaggcaccgggatctcgaccgatgcccttgagagccttcaacccagtcagctccttccggtgggcgcggggcatgactaacatgagaattacaacttatatcgtatggggctgacttcaggtgctacatttgaagagataaattgcactgaaatctagagtgatggtgtcgggaatccgtaaaggatcttcttgagatccttttacgatcgtcgtaatctcctgctctgtaaacgaaaaaaccgcctggggaggcggtttgatcgaaggttaagtcagttggggaactgcttaacctggtaactggctttagtggagcgcagataccaaatactgtcctttcagtgtagcctctgttaggccaccacttcaagactctcgatatctaaatccactaattctcagttaccaatggctgctgccagtggcgttttgtcgtgtctttccgggttggactcaagatgatagttaccggataaggcgcagcagtcgggctgaacggggggttcttgcacacagcccagcttggagcgaactgtctacacggaacgggacgtggtgatttgggtaaagcctccaccacaacacggacgccgcaggacgggaacaggagagcgcaagagggagccatcagggggaaacgcctggtatctttatagtcctgtcgggtttcgccaccactgatttgagcgtcagatttcgtgatgttcgtcaggggggcggagcctatggaaaaacggcttcgctccggccttattgtctctctgctaagtatcctcctggcatcttctaggacgtttctgcgctagcatgccta

SEQ ID NO: 72 - DNA, 1913 bp, synthetic construct
  source 1..1913: mol_type = other DNA
ttatcaagtgagaaatcaccatgagtgacgactgaatccggtgagaatggcaaaagtttatgcatttctttccagacttgttcaacaggccagccattacgctcgtcatcaaaatcactcgcatcaaccaaaccgttattcattcgtgattgcgcctgagcgagacgaaatacgcggtcgctgttaaaaggacaattacaaacaggaatcgaatgcaaccggcgcaggaacactgccagcgcatcaacaatattttcacctgaatcaggatattcttctaatacctggaatgctgttttcccggggatcgcagtggtgagtaaccatgcatcatcaggagtacggataaaatgcttgatggtcggaagaggcataaattccgtcagccagtttagtctgaccatctcatctgtaacatcattggcaacgctacctttgccatgtttcagaaacaactctggcgcatcgggcttcccatacaatcgatagattgtcgcacctgattgcccgacattatcgcgagcccatttatacccatataaatcagcatccatgttggaatttaatcgcggcctagagcaagacgtttcccgttgaatatggctcatactcttcctttttcaatattattgaagcatttatcagggttattgtctcatgagcggatacatatttgaatgtatttagaaaaataaacaaataggcatgctagcgcagaaacgtcctagaagatgccaggaggatacttagcagagagacaataaggccggagcgaagccgtttttccataggctccgcccccctgacgaacatcacgaaatctgacgctcaaatcagtggtggcgaaacccgacaggactataaagataccaggcgtttccccctgatggctccctcttgcgctctcctgttcccgtcctgcggcgtccgtgttgtggtggaggctttacccaaatcaccacgtcccgttccgtgtagacagttcgctccaagctgggctgtgtgcaagaaccccccgttcagcccgactgctgcgccttatccggtaactatcatcttgagtccaacccggaaagacacgacaaaacgccactggcagcagccattggtaactgagaattagtggatttagatatcgagagtcttgaagtggtggcctaacagaggctacactgaaaggacagtatttggtatctgcgctccactaaagccagttaccaggttaagcagttccccaactgacttaaccttcgatcaaaccgcctccccaggcggttttttcgtttacagagcaggagattacgacgatcgtaaaaggatctcaagaagatcctttacggattcccgacaccatcactctagatttcagtgcaatttatctcttcaaatgtagcacctgaagtcagccccatacgatataagttgtaattctcatgttagtcatgccccgcgcccaccggaaggagctgactgggttgaaggctctcaagggcatcggtcgagatcccggtgcctaatgagtgagctaacaaaccggtaaaccagcaatagacataagcggctatttaacgaccctgccctgaaccgacgacaagctgacgaccgggtctccgcaagtggcacttttcggggaaatgtgcgcggaacccctatttgtttatttttctaaatacattcaaatatgtatccgctcatgaattaattcttagaaaaactcatcgagcatcaaatgaaactgcaatttattcatatcaggattatcaataccatatttttgaaaaagccgtttctgtaatgaaggagaaaactcaccgaggcagttccataggatggcaagatcctggtatcggtctgcgattccgactcgtccaacatcaatacaacctattaatttcccctcgtcaaaaataagg

SEQ ID NO: 73 - DNA, 5023 bp, synthetic construct
  source 1..5023: mol_type = other DNA
cagcagggccgcgccggtggcgtttttccataggctccgccctcctgccagagttcacataaacagacgcttttccggtgcatctgtgggagccgtgaggctcaaccatgaatctgacagtacgggcgaaacccgacaggacttaaagatccccaccgtttccggcgggtcgctccctcttgcgctctcctgttccgaccctgccgtttaccggatacctgttccgcctttctcccttacgggaagtgtggcgctttctcatagctcacacactggtatctcggctcggtgtaggtcgttcgctccaagctgggctgtaagcaagaactccccgttcagcccgactgctgcgccttatccggtaactgttcacttgagtccaacccggaaaagcacggtaaaacgccactggcagcagccattggtaactgggagttcgcagaggatttgtttagctaaacacgcggttgctcttgaagtgtgcgccaaagtccggctacactggaaggacagatttggttgctgtgctctgcgaaagccagttaccacggttaagcagttccccaactgacttaaccttcgatcaaaccacctccccaggtggttttttcgtttacagggcaaaagattacgcgcagaaaaaaaggatctcaagaagatcctttgatcttttctactgaaccgctctagatttcagtgcaatttatctcttcaaatgtagcacctgaagtcagccccatacgatataagttgtaattctcatgttagtcatgccccgcgcccaccggaaggagctgactgggttgaaggctctcaagggcatcggtcgagatcccggtgcctaatgagtgagctaacttacattaattgcgttgcgctcactgcccgctttccagtcgggaaacctgtcgtgccagctgcattaatgaatcggccaacgcgcggggagaggcggtttgcgtattgggcgccagggtggtttttcttttcaccagtgagacgggcaacagctgattgcccttcaccgcctggccctgagagagttgcagcaagcggtccacgctggtttgccccagcaggcgaaaatcctgtttgatggtggttaacggcgggatataacatgagctgtcttcggtatcgtcgtatcccactaccgagatgtccgcaccaacgcgcagcccggactcggtaatggcgcgcattgcgcccagcgccatctgatcgttggcaaccagcatcgcagtgggaacgatgccctcattcagcatttgcatggtttgttgaaaaccggacatggcactccagtcgccttcccgttccgctatcggctgaatttgattgcgagtgagatatttatgccagccagccagacgcagacgcgccgagacagaacttaatgggcccgctaacagcgcgatttgctggtgacccaatgcgaccagatgctccacgcccagtcgcgtaccgtcttcatgggagaaaataatactgttgatgggtgtctggtcagagacatcaagaaataacgccggaacattagtgcaggcagcttccacagcaatggcatcctggtcatccagcggatagttaatgatcagcccactgacgcgttgcgcgagaagattgtgcaccgccgctttacaggcttcgacgccgcttcgttctaccatcgacaccaccacgctggcacccagttgatcggcgcgagatttaatcgccgcgacaatttgcgacggcgcgtgcagggccagactggaggtggcaacgccaatcagcaacgactgtttgcccgccagttgttgtgccacgcggttgggaatgtaattcagctccgccatcgccgcttccactttttcccgcgttttcgcagaaacgtggctggcctggttcaccacgcgggaaacggtctgataagagacaccggcatactctgcgacatcgtataacgttactggtttcacattcaccaccctgaattgactctcttccgggcgctatcatgccataccgcgaaaggttttgcgccattcgatggtgtccgggagaaattaatacgactcactataggcctcgagtaaggatgtcacaagccctccatttcggtcaaggcgttcatgacaacggctggggcatgttcaccactttccttcagtacaagctggccgaacaggggaagaagctgatcaaaatcgacaaatggttcccctcgtccaaaacgtgttcgtgctgcggtcgagtcaaggagtctctatcgctttctgaacggacattccgctgtgaatgtggattcgagagcgacagggacgtcaatgcggccatcaatatcaaacatgagggcatgaaacgattggcgatcgtctaatttgtcctcgaaccgtggggcacacggggatcgctcggtcaacttcccatcatgagatgggattacccgagaagcccccacctctaagcgaagcgtaggtggtgggagtatgtcacgctgatcgaaaagcatgaactgccttctgtgtactgggaactcgcggccgcaataactagcataaccccttggggcctctaaacgggtcttgaggggttttttgctgaagtcgacttaatacgactcactataggggaattgtgagcggataacaattcccaggtaccaaggagatataccatggtggccaacaaagcctaccaattccgtctttatccaaccaaagaacaagagcaacttctggcgaaaactttcggctgtgtgcgctttgtttacaacaaaatgctggaagaacgtattcagcttttcgagaagttcaaggatgatcaagaatcgttaaaacaacaaacgtgtccgacacctgctaaatataaaaaggaatttccttggttgaaagaagtggacagcttggcactggccaacgcccaattaaacctgcaaaaagcatttcaacactttttctccggccgtgccggattccctaaatttaagaaccgtaaggcgaaacaatcatacactacaaacatggtgaatggcaacattaagttgtcggatgggtatatcaaattgccaaaactgaaatggatcaaatttaaacagcatcgtgaaattccagcgcatcatattatcaaaagttgcactatcactaagacaaagaccgggaaatactacattagcatcttaacagaatacgagcaccaaccagcacttaaagaggtgcaaactgtggttggactggatttcagtatgagcacgttgtatgttgattctgaaggcaagcgtgctaactatccgcgcttctatcgtaaagcattggaaacgttggccaaagaacaacgtaagctttctcgtaaaaaaaaaggatcaaatcgttggcataagcagcgtttaaaggttgccaaattgcacgaaaagatggcgaaccaacgcaaggactttctgcacaaggaatctcacaaacttgccaagcgctatgattgcgttgtaatcgaggatcttaatatgaaaggcatgagccaagcgctgcactttggacagggggtacatgataatggatggggtatgtttacaacgtttttacagtataaattggcggagcaagggaaaaagttgattaagattgataagtggttcccatcctcaaaaacctgcagctgttgcgggcgtgtgaaagagagcttgtcactgagcgaacgcaccttccgttgtgagtgcgggttcgaaagtgaccgcgatgtaaacgcggctatcaacattaagcacgaggggatgaagcgtttggccattgtatgataacctaggctgctgccaccgctgagcaataactagcataaccccttggggcctctaaacgggtcttgaggggttttttgctgaaacctcaggcatttgagaagcacacggtcacactgcttccggtagtcaataaaccggtaaaccagcaatagacataagcggctatttaacgaccctgccctgaaccgacgaccgggtcatcgtggccggatcttgcggcccctcggcttgaacgaattgttagacattatttgccgactaccttggtgatctcgcctttcacgtagtggacaaattcttccaactgatctgcgcgcgaggccaagcgatcttcttcttgtccaagataagcctgtctagcttcaagtatgacgggctgatactgggccggcaggcgctccattgcccagtcggcagcgacatccttcggcgcgattttgccggttactgcgctgtaccaaatgcgggacaacgtaagcactacatttcgctcatcgccagcccagtcgggcggcgagttccatagcgttaaggtttcatttagcgcctcaaatagatcctgttcaggaaccggatcaaagagttcctccgccgctggacctaccaaggcaacgctatgttctcttgcttttgtcagcaagatagccagatcaatgtcgatcgtggctggctcgaagatacctgcaagaatgtcattgcgctgccattctccaaattgcagttcgcgcttagctggataacgccacggaatgatgtcgtcgtgcacaacaatggtgacttctacagcgcggagaatctcgctctctccaggggaagccgaagtttccaaaaggtcgttgatcaaagctcgccgcgttgtttcatcaagccttacggtcaccgtaaccagcaaatcaatatcactgtgtggcttcaggccgccatccactgcggagccgtacaaatgtacggccagcaacgtcggttcgagatggcgctcgatgacgccaactacctctgatagttgagtcgatacttcggcgatcaccgcttccctcatactcttcctttttcaatattattgaagcatttatcagggttattgtctcatgagcggatacatatttgaatgtatttagaaaaataaacaaatagctagctcactcggtcgctacgctccgggcgtgagactgcggcgggcgctgcggacacatacaaagttacccacagattccgtggataagcaggggactaacatgtgaggcaaaa

SEQ ID NO: 74 - DNA, 5003 bp, synthetic construct
  source 1..5003: mol_type = other DNA
ttttctactgaaccgctctagatttcagtgcaatttatctcttcaaatgtagcacctgaagtcagccccatacgatataagttgtaattctcatgttagtcatgccccgcgcccaccggaaggagctgactgggttgaaggctctcaagggcatcggtcgagatcccggtgcctaatgagtgagctaacttacattaattgcgttgcgctcactgcccgctttccagtcgggaaacctgtcgtgccagctgcattaatgaatcggccaacgcgcggggagaggcggtttgcgtattgggcgccagggtggtttttcttttcaccagtgagacgggcaacagctgattgcccttcaccgcctggccctgagagagttgcagcaagcggtccacgctggtttgccccagcaggcgaaaatcctgtttgatggtggttaacggcgggatataacatgagctgtcttcggtatcgtcgtatcccactaccgagatgtccgcaccaacgcgcagcccggactcggtaatggcgcgcattgcgcccagcgccatctgatcgttggcaaccagcatcgcagtgggaacgatgccctcattcagcatttgcatggtttgttgaaaaccggacatggcactccagtcgccttcccgttccgctatcggctgaatttgattgcgagtgagatatttatgccagccagccagacgcagacgcgccgagacagaacttaatgggcccgctaacagcgcgatttgctggtgacccaatgcgaccagatgctccacgcccagtcgcgtaccgtcttcatgggagaaaataatactgttgatgggtgtctggtcagagacatcaagaaataacgccggaacattagtgcaggcagcttccacagcaatggcatcctggtcatccagcggatagttaatgatcagcccactgacgcgttgcgcgagaagattgtgcaccgccgctttacaggcttcgacgccgcttcgttctaccatcgacaccaccacgctggcacccagttgatcggcgcgagatttaatcgccgcgacaatttgcgacggcgcgtgcagggccagactggaggtggcaacgccaatcagcaacgactgtttgcccgccagttgttgtgccacgcggttgggaatgtaattcagctccgccatcgccgcttccactttttcccgcgttttcgcagaaacgtggctggcctggttcaccacgcgggaaacggtctgataagagacaccggcatactctgcgacatcgtataacgttactggtttcacattcaccaccctgaattgactctcttccgggcgctatcatgccataccgcgaaaggttttgcgccattcgatggtgtccgggattgacagctagctcagtcctaggtataatgctagcgtggagatatacctcgagttaagcgcggcttgtatcgaacaaagtctggcaaactaattaatgctgatgtcaatggcgcattaaacatcttaaagaaaagtaaagctgtagacctgagtgtcttatgctctagcggcgaagtggacacgcctcaaagaataaggattgcttgaagcagtcaaacttctttggaagcccccacttcaaattttcgctagaaaattaagtgggggtagttcacggacaagtggttcaccatgcgttgctttatggtatgatagctcgcggccgcaataactagcataaccccttggggcctctaaacgggtcttgaggggttttttgctgaagtcgattttacggctagctcagtcctaggtactatgctagcgtggagatatacggtaccaaggagatataccatgggctatttttgcatcaagcagcagcttaatgggttgacgaaggaagagtacctgacactgcgtgagttgtgccatattgccaaaaacatgtacaacgttggcctttacaacgtacgtcagtactattttgagcataaggagttcttaaattacgaaaagaactatcacttggcgaagactaatgaaaactacaagttactgaactcgaacatggctcaacaaatcttgaaaaaagtaaatgaagccttcaaaagtttcttcggtcttatttcgcttgccaaacaaggtaaatacgaccataaagcaatctcgattcccaaatacttaaagaaagacggtttccattcgttaatcatcggccaaatccgcattgacggaaataagttcacgattccatactctcgcttattcaaaaagacacataagcccattacaatcactattccaccagtgttacttgataaaaagattaagcagatcgaaatcattccgaaacaccatgcacgtttcttcgagatccagtacaagtacgaaatgcctgaagatcagcgcgaacttaatgatcagaaggcgcttgcgattgacttggggcttaataacttggctacatgtgtaacctcagacggacgttctttcattattgacggccgtcgtcttaaatctatcaaccaatggttcaataaggaaaacgctcgcttgcagtctattaaagataaacagaagattaagggaaccacgcgtaaacaagcactgcttgcgatgaatcgtaataacaaggtgaacgactatatcaataagacctgccgctatatcattaactactgtatcgaaaatcaaattggcaagctggtaatcgggtacgccgaaacatggcagcgcaacatgaatttgggcaagaaaaccaaccaaaacttcgtcaatatccctcttggaaacattaaggagaagttagaatacctttgtgagttctatgggatcgagtttttgaagcaagaagagtcgtatacaagtcaagcgtcgttttttgatggagatgaaatccccgaatacaacgcggataatcccaaagagtacaaattttctggtaagcgcattaagcgcggcctgtatcgcactaaatcaggaaaacttattaacgcagacgtgaatggggcattgaatattttaaaaaaaagcaaggctgttgatttgtctgtcttgtgcagttctggtgaggtagacaccccgcaacgtattcgcatcgcgtgataacctaggctgctgccaccgctgagcaataactagcataaccccttggggcctctaaacgggtcttgaggggttttttgctgaaacctcaggcatttgagaagcacacggtcacactgcttccggtagtcaataaaccggtaaaccagcaatagacataagcggctatttaacgaccctgccctgaaccgacgaccgggtcatcgtggccggatcttgcggcccctcggcttgaacgaattgttagacattatttgccgactaccttggtgatctcgcctttcacgtagtggacaaattcttccaactgatctgcgcgcgaggccaagcgatcttcttcttgtccaagataagcctgtctagcttcaagtatgacgggctgatactgggccggcaggcgctccattgcccagtcggcagcgacatccttcggcgcgattttgccggttactgcgctgtaccaaatgcgggacaacgtaagcactacatttcgctcatcgccagcccagtcgggcggcgagttccatagcgttaaggtttcatttagcgcctcaaatagatcctgttcaggaaccggatcaaagagttcctccgccgctggacctaccaaggcaacgctatgttctcttgcttttgtcagcaagatagccagatcaatgtcgatcgtggctggctcgaagatacctgcaagaatgtcattgcgctgccattctccaaattgcagttcgcgcttagctggataacgccacggaatgatgtcgtcgtgcacaacaatggtgacttctacagcgcggagaatctcgctctctccaggggaagccgaagtttccaaaaggtcgttgatcaaagctcgccgcgttgtttcatcaagccttacggtcaccgtaaccagcaaatcaatatcactgtgtggcttcaggccgccatccactgcggagccgtacaaatgtacggccagcaacgtcggttcgagatggcgctcgatgacgccaactacctctgatagttgagtcgatacttcggcgatcaccgcttccctcatactcttcctttttcaatattattgaagcatttatcagggttattgtctcatgagcggatacatatttgaatgtatttagaaaaataaacaaatagctagctcactcggtcgctacgctccgggcgtgagactgcggcgggcgctgcggacacatacaaagttacccacagattccgtggataagcaggggactaacatgtgaggcaaaacagcagggccgcgccggtggcgtttttccataggctccgccctcctgccagagttcacataaacagacgcttttccggtgcatctgtgggagccgtgaggctcaaccatgaatctgacagtacgggcgaaacccgacaggacttaaagatccccaccgtttccggcgggtcgctccctcttgcgctctcctgttccgaccctgccgtttaccggatacctgttccgcctttctcccttacgggaagtgtggcgctttctcatagctcacacactggtatctcggctcggtgtaggtcgttcgctccaagctgggctgtaagcaagaactccccgttcagcccgactgctgcgccttatccggtaactgttcacttgagtccaacccggaaaagcacggtaaaacgccactggcagcagccattggtaactgggagttcgcagaggatttgtttagctaaacacgcggttgctcttgaagtgtgcgccaaagtccggctacactggaaggacagatttggttgctgtgctctgcgaaagccagttaccacggttaagcagttccccaactgacttaaccttcgatcaaaccacctccccaggtggttttttcgtttacagggcaaaagattacgcgcagaaaaaaaggatctcaagaagatcctttgatc

SEQ ID NO: 75 - DNA, 4932 bp, synthetic construct
  source 1..4932: mol_type = other DNA
caccgtaaccagcaaatcaatatcactgtgtggcttcaggccgccatccactgcggagccgtacaaatgtacggccagcaacgtcggttcgagatggcgctcgatgacgccaactacctctgatagttgagtcgatacttcggcgatcaccgcttccctcatactcttcctttttcaatattattgaagcatttatcagggttattgtctcatgagcggatacatatttgaatgtatttagaaaaataaacaaatagctagctcactcggtcgctacgctccgggcgtgagactgcggcgggcgctgcggacacatacaaagttacccacagattccgtggataagcaggggactaacatgtgaggcaaaacagcagggccgcgccggtggcgtttttccataggctccgccctcctgccagagttcacataaacagacgcttttccggtgcatctgtgggagccgtgaggctcaaccatgaatctgacagtacgggcgaaacccgacaggacttaaagatccccaccgtttccggcgggtcgctccctcttgcgctctcctgttccgaccctgccgtttaccggatacctgttccgcctttctcccttacgggaagtgtggcgctttctcatagctcacacactggtatctcggctcggtgtaggtcgttcgctccaagctgggctgtaagcaagaactccccgttcagcccgactgctgcgccttatccggtaactgttcacttgagtccaacccggaaaagcacggtaaaacgccactggcagcagccattggtaactgggagttcgcagaggatttgtttagctaaacacgcggttgctcttgaagtgtgcgccaaagtccggctacactggaaggacagatttggttgctgtgctctgcgaaagccagttaccacggttaagcagttccccaactgacttaaccttcgatcaaaccacctccccaggtggttttttcgtttacagggcaaaagattacgcgcagaaaaaaaggatctcaagaagatcctttgatcttttctactgaaccgctctagatttcagtgcaatttatctcttcaaatgtagcacctgaagtcagccccatacgatataagttgtaattctcatgttagtcatgccccgcgcccaccggaaggagctgactgggttgaaggctctcaagggcatcggtcgagatcccggtgcctaatgagtgagctaacttacattaattgcgttgcgctcactgcccgctttccagtcgggaaacctgtcgtgccagctgcattaatgaatcggccaacgcgcggggagaggcggtttgcgtattgggcgccagggtggtttttcttttcaccagtgagacgggcaacagctgattgcccttcaccgcctggccctgagagagttgcagcaagcggtccacgctggtttgccccagcaggcgaaaatcctgtttgatggtggttaacggcgggatataacatgagctgtcttcggtatcgtcgtatcccactaccgagatgtccgcaccaacgcgcagcccggactcggtaatggcgcgcattgcgcccagcgccatctgatcgttggcaaccagcatcgcagtgggaacgatgccctcattcagcatttgcatggtttgttgaaaaccggacatggcactccagtcgccttcccgttccgctatcggctgaatttgattgcgagtgagatatttatgccagccagccagacgcagacgcgccgagacagaacttaatgggcccgctaacagcgcgatttgctggtgacccaatgcgaccagatgctccacgcccagtcgcgtaccgtcttcatgggagaaaataatactgttgatgggtgtctggtcagagacatcaagaaataacgccggaacattagtgcaggcagcttccacagcaatggcatcctggtcatccagcggatagttaatgatcagcccactgacgcgttgcgcgagaagattgtgcaccgccgctttacaggcttcgacgccgcttcgttctaccatcgacaccaccacgctggcacccagttgatcggcgcgagatttaatcgccgcgacaatttgcgacggcgcgtgcagggccagactggaggtggcaacgccaatcagcaacgactgtttgcccgccagttgttgtgccacgcggttgggaatgtaattcagctccgccatcgccgcttccactttttcccgcgttttcgcagaaacgtggctggcctggttcaccacgcgggaaacggtctgataagagacaccggcatactctgcgacatcgtataacgttactggtttcacattcaccaccctgaattgactctcttccgggcgctatcatgccataccgcgaaaggttttgcgccattcgatggtgtccgggattgacagctagctcagtcctaggtataatgctagcgtggagatatacctcgagtttacggtcaaaccgtttacgtatcgacggattgcttaggtatgaagtcgtagatggcgagttcccgcccttgagtatcatggatactcatgttgcctgtggctcccaacgggacgggtgccaggtgttgcctgcagataggctgccaaccagcctatcatgcatccacctccgaaggggaaacaggaaacccccacttcgataagtgggggaggttcatcggtcattttcccgtgttttcgttctctgtctccagcgcactcgcggccgcaataactagcataaccccttggggcctctaaacgggtcttgaggggttttttgctgaagtcgacttttacggctagctcagtcctaggtactatgctagcgtggagatatacggtaccaaggagatataccatgggctaccgcacactgaaaactcgtttccgcgccaagaaagaagttatccagaagttgtttgaatgcaaccgtatctccgcggaggtttggaacgagtgcctgcgcttagctaaagagcatcaccttgagaccggcaagtggattactaaaacggaacttcaaaaagccacgaagggccgcttttctattcatagccagagtattcaagcggtagttcataagtacattttcgcgcgcgatggggctaaagaggcccgtaagaaaggagaaaaaatcaagtatccatacaaaaaaaagaagcacttcaatactaagtgggctaaagatggcttcgtgttgcatgaagacggaacgcttgaattgtcgttaggaatctggaatcgtaagcgtcaatcgcctttggtggtgaaaatcgataaagagaagttaccaaacggcaaagtaaaagaaattgagttggtctatgaccgcgggttgtggttatgcttgagctatgaagacggcaaaaaacctaaagaaaacccttgtaagaatcgcgtagcaatcgacccaggagagatccacacgattgcagcgatctgtgagaatggcgaatcgctgattattactggtcgtaaaatccgctcgattcaccgccttcgtaacaagaaacttaaagaattgcagaagttgatgtcgcgctgtaagaaggggagtaagcagtggaaaaaatataaccgtgccaagcagtatgttttatcaaaatcggaagcccagcttaaagatgctttgcacaaaacgacccgccaattcgttcgctggtgtctggagaatcaagtcaaggaggtggtaattggtgacatcgagggtattcagcgtaatactaagaagaagcgcaacaagaaaacgaatcaaaagctgagtaattggtcgttcggtaagctgtttgattatctgaagtataagttaaatgccgaggggatccagattgaaaaaaaggacgaatcgtacacctcacaaacctgcccggtctgcggaaagaagaacaagtcgagttcacgcaactacacctgtcagtgtgggtataaacgtcaccgtgatatccacggggccatgaatttattcgcaaaggtctattacggggagattcgcccccttgagtttaccgttaaaccgttcacttaccgtcgtatcgcgtaataagagctcctgctgccaccgctgagcaataactagcataaccccttggggcctctaaacgggtcttgaggggttttttgctgaaacctcaggcatttgagaagcacacggtcacactgcttccggtagtcaataaaccggtaaaccagcaatagacataagcggctatttaacgaccctgccctgaaccgacgaccgggtcatcgtggccggatcttgcggcccctcggcttgaacgaattgttagacattatttgccgactaccttggtgatctcgcctttcacgtagtggacaaattcttccaactgatctgcgcgcgaggccaagcgatcttcttcttgtccaagataagcctgtctagcttcaagtatgacgggctgatactgggccggcaggcgctccattgcccagtcggcagcgacatccttcggcgcgattttgccggttactgcgctgtaccaaatgcgggacaacgtaagcactacatttcgctcatcgccagcccagtcgggcggcgagttccatagcgttaaggtttcatttagcgcctcaaatagatcctgttcaggaaccggatcaaagagttcctccgccgctggacctaccaaggcaacgctatgttctcttgcttttgtcagcaagatagccagatcaatgtcgatcgtggctggctcgaagatacctgcaagaatgtcattgcgctgccattctccaaattgcagttcgcgcttagctggataacgccacggaatgatgtcgtcgtgcacaacaatggtgacttctacagcgcggagaatctcgctctctccaggggaagccgaagtttccaaaaggtcgttgatcaaagctcgccgcgttgtttcatcaagccttacggt

SEQ ID NO: 76 - DNA, 4869 bp, synthetic construct
  source 1..4869: mol_type = other DNA
caccgtaaccagcaaatcaatatcactgtgtggcttcaggccgccatccactgcggagccgtacaaatgtacggccagcaacgtcggttcgagatggcgctcgatgacgccaactacctctgatagttgagtcgatacttcggcgatcaccgcttccctcatactcttcctttttcaatattattgaagcatttatcagggttattgtctcatgagcggatacatatttgaatgtatttagaaaaataaacaaatagctagctcactcggtcgctacgctccgggcgtgagactgcggcgggcgctgcggacacatacaaagttacccacagattccgtggataagcaggggactaacatgtgaggcaaaacagcagggccgcgccggtggcgtttttccataggctccgccctcctgccagagttcacataaacagacgcttttccggtgcatctgtgggagccgtgaggctcaaccatgaatctgacagtacgggcgaaacccgacaggacttaaagatccccaccgtttccggcgggtcgctccctcttgcgctctcctgttccgaccctgccgtttaccggatacctgttccgcctttctcccttacgggaagtgtggcgctttctcatagctcacacactggtatctcggctcggtgtaggtcgttcgctccaagctgggctgtaagcaagaactccccgttcagcccgactgctgcgccttatccggtaactgttcacttgagtccaacccggaaaagcacggtaaaacgccactggcagcagccattggtaactgggagttcgcagaggatttgtttagctaaacacgcggttgctcttgaagtgtgcgccaaagtccggctacactggaaggacagatttggttgctgtgctctgcgaaagccagttaccacggttaagcagttccccaactgacttaaccttcgatcaaaccacctccccaggtggttttttcgtttacagggcaaaagattacgcgcagaaaaaaaggatctcaagaagatcctttgatcttttctactgaaccgctctagatttcagtgcaatttatctcttcaaatgtagcacctgaagtcagccccatacgatataagttgtaattctcatgttagtcatgccccgcgcccaccggaaggagctgactgggttgaaggctctcaagggcatcggtcgagatcccggtgcctaatgagtgagctaacttacattaattgcgttgcgctcactgcccgctttccagtcgggaaacctgtcgtgccagctgcattaatgaatcggccaacgcgcggggagaggcggtttgcgtattgggcgccagggtggtttttcttttcaccagtgagacgggcaacagctgattgcccttcaccgcctggccctgagagagttgcagcaagcggtccacgctggtttgccccagcaggcgaaaatcctgtttgatggtggttaacggcgggatataacatgagctgtcttcggtatcgtcgtatcccactaccgagatgtccgcaccaacgcgcagcccggactcggtaatggcgcgcattgcgcccagcgccatctgatcgttggcaaccagcatcgcagtgggaacgatgccctcattcagcatttgcatggtttgttgaaaaccggacatggcactccagtcgccttcccgttccgctatcggctgaatttgattgcgagtgagatatttatgccagccagccagacgcagacgcgccgagacagaacttaatgggcccgctaacagcgcgatttgctggtgacccaatgcgaccagatgctccacgcccagtcgcgtaccgtcttcatgggagaaaataatactgttgatgggtgtctggtcagagacatcaagaaataacgccggaacattagtgcaggcagcttccacagcaatggcatcctggtcatccagcggatagttaatgatcagcccactgacgcgttgcgcgagaagattgtgcaccgccgctttacaggcttcgacgccgcttcgttctaccatcgacaccaccacgctggcacccagttgatcggcgcgagatttaatcgccgcgacaatttgcgacggcgcgtgcagggccagactggaggtggcaacgccaatcagcaacgactgtttgcccgccagttgttgtgccacgcggttgggaatgtaattcagctccgccatcgccgcttccactttttcccgcgttttcgcagaaacgtggctggcctggttcaccacgcgggaaacggtctgataagagacaccggcatactctgcgacatcgtataacgttactggtttcacattcaccaccctgaattgactctcttccgggcgctatcatgccataccgcgaaaggttttgcgccattcgatggtgtccgggattgacagctagctcagtcctaggtataatgctagcgtggagatatacctcgagtatacctcaaacgatgaccgcattggtgctatgaaccttcaacgaaaaggaatagagtacatcgttgaaggaacgacacaggcatgacctgcgtcgttgggtagttgtcaacctgccccctgatgcaaccccaagtcaaggaaggaggacgaagtccgctcgcacttctggggagttgcaagcccccacttcaagcgttagctaagtgggggtagttgaccgcccctcttgtttgttgtgcaaattggtccggttccttactcgcggccgcaataactagcataaccccttggggcctctaaacgggtcttgaggggttttttgctgaagtcgacttttacggctagctcagtcctaggtactatgctagcgtggagatatacggtaccaaggagatataccatggatatgacgctgaccgcaaaaatcaaaatttaccctactgcggaacaggctgaagtattaaaggctacattatcagcttaccgtcaagcctgtaatgccgtttcagtagtaatttttgacacaaaggtgctggcccaagcaaaactgcatgacatgacataccgcttactgcgttctaactacgcactgcgttcacaaatggcccaatcggtgatcaaaacagttatcgctcgttatcgttcgttaaagtctaatggccatgagtggaccttggtacgcttcaagaaaccagaatacgacttggtttggaatcgtgactactccattgtccaaggccttttttccgtcaacaccctggaaggacgcatcaaggtctcatttgaaccgaaaggtatggaaccttattttgacgggtcctggacttttggaacggccaagctggtttacaaacataacaaattttttctgcacatcccgatgactaaaacaattcctaccgtggatgaacacaatattcgccaggtcgttggggtggatgtgggtgtgaacttcttggctgttgcttatgactcgcaaggaaaaaccattttttttaacggtcgtaagattaaacacatgcgcgctaagtacaaacgtatgcgcaaaacgcttcagcaaaagggaacggcctcggcacgtcgcaagctgaaaaccatcggccaacgtgagaatcgctggatgactgacgtgaaccatgcagttactaaagcattagtgcgtcaatacggcgaacgcacgttgttcgttttggaagaccttacggggatccgcgagaaaacagaacgtgtgcgcatccacgaccgttacgagacggtgtcttgggcattttatcaattccgtcaaatgttagagtacaaggcacgcttgcatgggtccaaggttatcgtcgtcgctcctcattacacatccttgacctgccccaaatgtggacatacagaaaaagccaaccgtaaaaagcgcacccacaccttctgttgtcgcacttgcggctacacgagcaacgatgaccgtatcggggccatgaacttgcaacgtaaggggattgaatatattgttgaaggcaccacccaagcgtgataagagctcctgctgccaccgctgagcaataactagcataaccccttggggcctctaaacgggtcttgaggggttttttgctgaaacctcaggcatttgagaagcacacggtcacactgcttccggtagtcaataaaccggtaaaccagcaatagacataagcggctatttaacgaccctgccctgaaccgacgaccgggtcatcgtggccggatcttgcggcccctcggcttgaacgaattgttagacattatttgccgactaccttggtgatctcgcctttcacgtagtggacaaattcttccaactgatctgcgcgcgaggccaagcgatcttcttcttgtccaagataagcctgtctagcttcaagtatgacgggctgatactgggccggcaggcgctccattgcccagtcggcagcgacatccttcggcgcgattttgccggttactgcgctgtaccaaatgcgggacaacgtaagcactacatttcgctcatcgccagcccagtcgggcggcgagttccatagcgttaaggtttcatttagcgcctcaaatagatcctgttcaggaaccggatcaaagagttcctccgccgctggacctaccaaggcaacgctatgttctcttgcttttgtcagcaagatagccagatcaatgtcgatcgtggctggctcgaagatacctgcaagaatgtcattgcgctgccattctccaaattgcagttcgcgcttagctggataacgccacggaatgatgtcgtcgtgcacaacaatggtgacttctacagcgcggagaatctcgctctctccaggggaagccgaagtttccaaaaggtcgttgatcaaagctcgccgcgttgtttcatcaagccttacggt

SEQ ID NO: 77 - DNA, 5049 bp, synthetic construct
  source 1..5049: mol_type = other DNA
ttttctactgaaccgctctagatttcagtgcaatttatctcttcaaatgtagcacctgaagtcagccccatacgatataagttgtaattctcatgttagtcatgccccgcgcccaccggaaggagctgactgggttgaaggctctcaagggcatcggtcgagatcccggtgcctaatgagtgagctaacttacattaattgcgttgcgctcactgcccgctttccagtcgggaaacctgtcgtgccagctgcattaatgaatcggccaacgcgcggggagaggcggtttgcgtattgggcgccagggtggtttttcttttcaccagtgagacgggcaacagctgattgcccttcaccgcctggccctgagagagttgcagcaagcggtccacgctggtttgccccagcaggcgaaaatcctgtttgatggtggttaacggcgggatataacatgagctgtcttcggtatcgtcgtatcccactaccgagatgtccgcaccaacgcgcagcccggactcggtaatggcgcgcattgcgcccagcgccatctgatcgttggcaaccagcatcgcagtgggaacgatgccctcattcagcatttgcatggtttgttgaaaaccggacatggcactccagtcgccttcccgttccgctatcggctgaatttgattgcgagtgagatatttatgccagccagccagacgcagacgcgccgagacagaacttaatgggcccgctaacagcgcgatttgctggtgacccaatgcgaccagatgctccacgcccagtcgcgtaccgtcttcatgggagaaaataatactgttgatgggtgtctggtcagagacatcaagaaataacgccggaacattagtgcaggcagcttccacagcaatggcatcctggtcatccagcggatagttaatgatcagcccactgacgcgttgcgcgagaagattgtgcaccgccgctttacaggcttcgacgccgcttcgttctaccatcgacaccaccacgctggcacccagttgatcggcgcgagatttaatcgccgcgacaatttgcgacggcgcgtgcagggccagactggaggtggcaacgccaatcagcaacgactgtttgcccgccagttgttgtgccacgcggttgggaatgtaattcagctccgccatcgccgcttccactttttcccgcgttttcgcagaaacgtggctggcctggttcaccacgcgggaaacggtctgataagagacaccggcatactctgcgacatcgtataacgttactggtttcacattcaccaccctgaattgactctcttccgggcgctatcatgccataccgcgaaaggttttgcgccattcgatggtgtccgggagaaattaatacgactcactataggcctcgagtgcggagccgttgcaacaagggcgcttgtgtgtagggaaggtcaactccccaccacttaaagcctaacggcttttgaagtgggggcttggcaagccctagttgactaccctcagccattcaatggctacgttggaagggtcatgacacttacggatgctcctccagtccgtaaccctgtcgcagatggttaaaagctctgatgggtaggagcggtgctgtctgccgaacaagcccttccaacattggggaggaggaactcactcctgaaaggaggtacacgtcttgttcgtgtacattatcaataagcatggaaaaccactcgcggccgcaataactagcataaccccttggggcctctaaacgggtcttgaggggttttttgctgaagtcgacttaatacgactcactataggggaattgtgagcggataacaattcccaggtaccaaggagatataccatggggtttgtatacattatcaataagcatggaaaaccgttaatgccgtgtagcccccgcaaagcacgtctgcttctgaaacaaaagaaagcaaaagtagttcgtcgtacaccgtttacgattcaattgctgtatggcagctccggctacaagcagccggtatcacttggcgtggatatgggcacccgccatgtcggcatttctgctactaccaagaaggatgtattgttcgaggcagaggcgcagttgcgtacggatattgtggaattgttagctatccgccgccagttccgccgctcgcgccgcaaccgcaagacccgttaccgtgaggctcgtttcttgaaccgtcgtaaacccgaagggtggttgccgccttcaatccaacataagattaattcgcatattaagctgattgatttagttcataacattttgcccgtgacgtctgttactattgaagtagccgcgttcgacacccagaaattaaaaaacttgaacattcgcggcgtcgagtaccaacagggggaacaaatgggtttttggaacgtacgcgaatacgtgttatatcgcgacaaccacacctgccagtattgtaagggtaagaaaaaagatccagtattgcaagtacaccatattgaatctcgcaagacgggtggcgactcgcccgataatttgattactttgtgcaagacgtgccatcatgagattcatgagaaaggcctggaacatatttttcaacgcaaacgcccgccaatgcgtgacgcgtctcagatgacggccatgcgttgggcgatgttttcccgcatccgtgagaagtacagccacgcgaacatcacatatggttatatcaccaaatgtattcgcatcgcgaacgggttaagcaagtcgcacatggtagacgcacgttgcatttcaggcaatcctttagcgaaaccgagtggtaccgtatatttgctgaagttcgttcgcaagaataatcgccaattacataaggcgacaattttgaaaggcggtaagcgtaaatccaacaaggctccccgcttcgtaaaggggttccagctgttcgataaagtcgtgtatgagcgtaaagagtgttttattttcgggcgtcgttcttccggctacttcgatttacgtctgcttgacgggactaaagtccacgcttcggccagctggaaaaaattaaaacgtgttgaacacgcaagtacattactgattgaacgccgtaagggggatagttcgccaaccttcgcattagcgtgataacctaggctgctgccaccgctgagcaataactagcataaccccttggggcctctaaacgggtcttgaggggttttttgctgaaacctcaggcatttgagaagcacacggtcacactgcttccggtagtcaataaaccggtaaaccagcaatagacataagcggctatttaacgaccctgccctgaaccgacgaccgggtcatcgtggccggatcttgcggcccctcggcttgaacgaattgttagacattatttgccgactaccttggtgatctcgcctttcacgtagtggacaaattcttccaactgatctgcgcgcgaggccaagcgatcttcttcttgtccaagataagcctgtctagcttcaagtatgacgggctgatactgggccggcaggcgctccattgcccagtcggcagcgacatccttcggcgcgattttgccggttactgcgctgtaccaaatgcgggacaacgtaagcactacatttcgctcatcgccagcccagtcgggcggcgagttccatagcgttaaggtttcatttagcgcctcaaatagatcctgttcaggaaccggatcaaagagttcctccgccgctggacctaccaaggcaacgctatgttctcttgcttttgtcagcaagatagccagatcaatgtcgatcgtggctggctcgaagatacctgcaagaatgtcattgcgctgccattctccaaattgcagttcgcgcttagctggataacgccacggaatgatgtcgtcgtgcacaacaatggtgacttctacagcgcggagaatctcgctctctccaggggaagccgaagtttccaaaaggtcgttgatcaaagctcgccgcgttgtttcatcaagccttacggtcaccgtaaccagcaaatcaatatcactgtgtggcttcaggccgccatccactgcggagccgtacaaatgtacggccagcaacgtcggttcgagatggcgctcgatgacgccaactacctctgatagttgagtcgatacttcggcgatcaccgcttccctcatactcttcctttttcaatattattgaagcatttatcagggttattgtctcatgagcggatacatatttgaatgtatttagaaaaataaacaaatagctagctcactcggtcgctacgctccgggcgtgagactgcggcgggcgctgcggacacatacaaagttacccacagattccgtggataagcaggggactaacatgtgaggcaaaacagcagggccgcgccggtggcgtttttccataggctccgccctcctgccagagttcacataaacagacgcttttccggtgcatctgtgggagccgtgaggctcaaccatgaatctgacagtacgggcgaaacccgacaggacttaaagatccccaccgtttccggcgggtcgctccctcttgcgctctcctgttccgaccctgccgtttaccggatacctgttccgcctttctcccttacgggaagtgtggcgctttctcatagctcacacactggtatctcggctcggtgtaggtcgttcgctccaagctgggctgtaagcaagaactccccgttcagcccgactgctgcgccttatccggtaactgttcacttgagtccaacccggaaaagcacggtaaaacgccactggcagcagccattggtaactgggagttcgcagaggatttgtttagctaaacacgcggttgctcttgaagtgtgcgccaaagtccggctacactggaaggacagatttggttgctgtgctctgcgaaagccagttaccacggttaagcagttccccaactgacttaaccttcgatcaaaccacctccccaggtggttttttcgtttacagggcaaaagattacgcgcagaaaaaaaggatctcaagaagatcctttgatc

SEQ ID NO: 78 - DNA, 4386 bp, synthetic construct
  source 1..4386: mol_type = other DNA
atcccttaagatttaatacgactcactataggggaattgtgagcggataacaattcccggcgcgccgacttcgagcgaaggagacttcgaatgaagttggataataacaaccatagcgtcttccttctgtactatcatttggtattagttgtcaagtatcgtcgccaggtgattgatgacacaatctcggattacgcgaaggatatgtttgtccgtttaggtaagaattacaacattagcctggtagagtggaatcatgacatggaccatgttcacatcttattcaaagctcaccccaactcggaattgtcgaagttcattaatgcgtacaagtctgcttcaagtcgccttattaagaagcattttcctcaagtaaagcgcaaattgtggaaggagtacttttggtcccgctcattttgcctgcttacaacaggaggagcgcctatcgaggtcatcaaaaaatacatcgaaaatcaggggatgaaatgataacctaggcttgctgcctgcgctgagcaataactagcataaccccttggggcctctaaacgggtcttgaggggttttttgctgaaacctcagggcggagcgggcctcgtaaaaggctcgttttttttatcttaattaggcgagaagactcccacttcaacgaagcgaagcggagtaagtgggagatgaatcgccttaactatattttgctgaaaataggatagattcagtaaaatatagtatcatatagttagatgggaggtgaaaacggttacctgatcggcacgtaagaggttccaactttcaccataatgaaataagatcactaccgggcgtattttttgagttatcgagattttcaggagctaaggaagctaccatggagaaaaaaatcactggatataccaccgttgatatatcccaatggcatcgtaaagaacattttgaggcatttcagtcagttgctcaatgtacctataaccagaccgttcagctggatattacggcctttttaaagaccgtaaagaaaaataagcacaagttttatccggcctttattcacattcttgcccgcctgatgaatgctcatccggagttccgtatggcaatgaaagacggtgagctggtgatatgggatagtgttcacccttgttacaccgttttccatgagcaaactgaaacgttttcatcgctctggagtgaataccacgacgatttccggcagtttctacacatatattcgcaagatgtggcgtgttacggtgaaaacctggcctatttccctaaagggtttattgagaatatgtttttcgtctcagccaatccctgggtgagtttcaccagttttgatttaaacgtggccaatatggacaacttcttcgcccccgttttcactatgggcaaatattatacgcaaggcgacaaggtgctgatgccgctggcgattcaggttcatcatgccgtttgtgatggcttccatgtcggcagaatgcttaatgaattacaacagtactgcgatgagtggcagggcggggcgtaacacgtgtggacacgcctcaaagaataaggattgcttgaagcagtcaaacttctttggaagcccccacttcaaattttcgctagaaaattaagtgggggtagttcacggacaagtggttcaccatgcgttgctttatggtatgatagagcgtgaggttctagatgcattcgcgaggtaccgagctcgaattcactggccgtcgttttacaacgtcgtgactgggaaaaccctggcgttacccaacttaatcgccttgcagcacatccccctttcgccagctggcgtaatagcgaagaggcccgcaccgatcgcccttcccaacagttgcgcagcctgaatggcgaatggcgcctgatgcggtattttctccttacgcatctgtgcggtatttcacaccgcatatggtgcactctcagtacaatctgctctgatgccgcatagttaagccagccccgacacccgccaacacccgctgacgcgccctgacgggcttgtctgctcccggcatccgcttacagacaagctgtgaccgtctccgggagctgcatgtgtcagaggttttcaccgtcatcaccgaaacgcgcgagacgaaagggcctcgtgatacgcctatttttataggttaatgtcatgataataatggtttcttagacgtcaggtggcacttttcggggaaatgtgcgcggaacccctatttgtttatttttctaaatacattcaaatatgtatccgctcatgagacaataaccctgataaatgcttcaataatattgaaaaaggaagagtatgagtattcaacatttccgtgtcgcccttattcccttttttgcggcattttgccttcctgtttttgctcacccagaaacgctggtgaaagtaaaagatgctgaagatcagttgggtgcacgagtgggttacatcgaactggatctcaacagcggtaagatccttgagagttttcgccccgaagaacgttttccaatgatgagcacttttaaagttctgctatgtggcgcggtattatcccgtattgacgccgggcaagagcaactcggtcgccgcatacactattctcagaatgacttggttgagtactcaccagtcacagaaaagcatcttacggatggcatgacagtaagagaattatgcagtgctgccataaccatgagtgataacactgcggccaacttacttctgacaacgatcggaggaccgaaggagctaaccgcttttttgcacaacatgggggatcatgtaactcgccttgatcgttgggaaccggagctgaatgaagccataccaaacgacgagcgtgacaccacgatgcctgtagcaatggcaacaacgttgcgcaaactattaactggcgaactacttactctagcttcccggcaacaattaatagactggatggaggcggataaagttgcaggaccacttctgcgctcggcccttccggctggctggtttattgctgataaatctggagccggtgagcgtgggtctcgcggtatcattgcagcactggggccagatggtaagccctcccgtatcgtagttatctacacgacggggagtcaggcaactatggatgaacgaaatagacagatcgctgagataggtgcctcactgattaagcattggtaactgtcagaccaagtttactcatatatactttagattgatttaaaacttcatttttaatttaaaaggatctaggtgaagatcctttttgataatctcatgaccaaaatcccttaacgtgagttttcgttccactgagcgtcagaccccgtagaaaagatcaaaggatcttcttgagatcctttttttctgcgcgtaatctgctgcttgcaaacaaaaaaaccaccgctaccagcggtggtttgtttgccggatcaagagctaccaactctttttccgaaggtaactggcttcagcagagcgcagataccaaatactgttcttctagtgtagccgtagttaggccaccacttcaagaactctgtagcaccgcctacatacctcgctctgctaatcctgttaccagtggctgctgccagtggcgataagtcgtgtcttaccgggttggactcaagacgatagttaccggataaggcgcagcggtcgggctgaacggggggttcgtgcacacagcccagcttggagcgaacgacctacaccgaactgagatacctacagcgtgagctatgagaaagcgccacgcttcccgaagggagaaaggcggacaggtatccggtaagcggcagggtcggaacaggagagcgcacgagggagcttccagggggaaacgcctggtatctttatagtcctgtcgggtttcgccacctctgacttgagcgtcgatttttgtgatgctcgtcaggggggcggagcctatggaaaaacgccagcaacgcggcctttttacggttcctggccttttgctggccttttgctcacatgttctttcctgcgttatcccctgattctgtggataaccgtattaccgcctttgagtgagctgataccgctcgccgcagccgaacgaccgagcgcagcgagtcagtgagcgaggaagcggaagagcgcccaatacgcaaaccgcctctccccgcgcgttggccgattcattaatgcagctggcacgacaggtttcccgactggaaagcgggcagtgagcgcaacgcaattaatgtgagttagctcactcattaggcaccccaggctttacactttatgcttccggctcgtatgttgtgtggaattgtgagcggataacaatttcacacaggaaacagctatgaccatgattacgccaagcttgcatgcaggcctctgcagtcgacgggcccggg

SEQ ID NO: 79 - DNA, 45 bp, synthetic construct
  source 1..45: mol_type = other DNA
tttaagctgatcgaaaagcatgaactgccttctgtgtactgggaa

SEQ ID NO: 80 - DNA, 45 bp, synthetic construct
  source 1..45: mol_type = other DNA
tttatggacaagtggttcaccatgcgttgctttatggtatgatag

SEQ ID NO: 81 - DNA, 45 bp, synthetic construct
  source 1..45: mol_type = other DNA
tttaacggtcattttcccgtgttttcgttctctgtctccagcgca

SEQ ID NO: 82 - DNA, 45 bp, synthetic construct
  source 1..45: mol_type = other DNA
ttcatcgcccctcttgtttgttgtgcaaattggtccggttcctta

SEQ ID NO: 83 - DNA, 45 bp, synthetic construct
  source 1..45: mol_type = other DNA
tgcggagccgttgcaacaagggcgcttgtgtgtagggaagatgaa

SEQ ID NO: 84 - DNA, 6560 bp, synthetic construct
  source 1..6560: mol_type = other DNA
gcaaccaggtgtggaaagtccccaggctccccagcaggcagaagtatgcaaagcatgcatctcaattagtcagcaaccatagtcccgcccctaactccgcccatcccgcccctaactccgcccagttccgcccattctccgccccatggctgactaattttttttatttatgcagaggccgaggccgcctctgcctctgagctattccagaagtagtgaggaggcttttttggaggcctaggcttttgcaaaaagctcccgggagcttgtatatccattttcggatctgatcaagagacaggatgaggatcgtttcgcatgattgaacaagatggattgcacgcaggttctccggccgcttgggtggagaggctattcggctatgactgggcacaacagacaatcggctgctctgatgccgccgtgttccggctgtcagcgcaggggcgcccggttctttttgtcaagaccgacctgtccggtgccctgaatgaactgcaggacgaggcagcgcggctatcgtggctggccacgacgggcgttccttgcgcagctgtgctcgacgttgtcactgaagcgggaagggactggctgctattgggcgaagtgccggggcaggatctcctgtcatctcaccttgctcctgccgagaaagtatccatcatggctgatgcaatgcggcggctgcatacgcttgatccggctacctgcccattcgaccaccaagcgaaacatcgcatcgagcgagcacgtactcggatggaagccggtcttgtcgatcaggatgatctggacgaagagcatcaggggctcgcgccagccgaactgttcgccaggctcaaggcgcgcatgcccgacggcgaggatctcgtcgtgacccatggcgatgcctgcttgccgaatatcatggtggaaaatggccgcttttctggattcatcgactgtggccggctgggtgtggcggaccgctatcaggacatagcgttggctacccgtgatattgctgaagagcttggcggcgaatgggctgaccgcttcctcgtgctttacggtatcgccgctcccgattcgcagcgcatcgccttctatcgccttcttgacgagttcttctgagcgggactctggggttcgaaatgaccgaccaagcgacgcccaacctgccatcacgagatttcgattccaccgccgccttctatgaaaggttgggcttcggaatcgttttccgggacgccggctggatgatcctccagcgcggggatctcatgctggagttcttcgcccaccccaacttgtttattgcagcttataatggttacaaataaagcaatagcatcacaaatttcacaaataaagcatttttttcactgcattctagttgtggtttgtccaaactcatcaatgtatcttatcatgtctgtataccgtcgacctctagctagagcttggcgtaatcatggtcatagctgtttcctgtgtgaaattgttatccgctcacaattccacacaacatacgagccggaagcataaagtgtaaagcctggggtgcctaatgagtgagctaactcacattaattgcgttgcgctcactgcccgctttccagtcgggaaacctgtcgtgccagctgcattaatgaatcggccaacgcgcggggagaggcggtttgcgtattgggcgctcttccgcttcctcgctcactgactcgctgcgctcggtcgttcggctgcggcgagcggtatcagctcactcaaaggcggtaatacggttatccacagaatcaggggataacgcaggaaagaacatgtgagcaaaaggccagcaaaaggccaggaaccgtaaaaaggccgcgttgctggcgtttttccataggctccgcccccctgacgagcatcacaaaaatcgacgctcaagtcagaggtggcgaaacccgacaggactataaagataccaggcgtttccccctggaagctccctcgtgcgctctcctgttccgaccctgccgcttaccggatacctgtccgcctttctcccttcgggaagcgtggcgctttctcatagctcacgctgtaggtatctcagttcggtgtaggtcgttcgctccaagctgggctgtgtgcacgaaccccccgttcagcccgaccgctgcgccttatccggtaactatcgtcttgagtccaacccggtaagacacgacttatcgccactggcagcagccactggtaacaggattagcagagcgaggtatgtaggcggtgctacagagttcttgaagtggtggcctaactacggctacactagaagaacagtatttggtatctgcgctctgctgaagccagttaccttcggaaaaagagttggtagctcttgatccggcaaacaaaccaccgctggtagcggtttttttgtttgcaagcagcagattacgcgcagaaaaaaaggatctcaagaagatcctttgatcttttctacggggtctgacgctcagtggaacgaaaactcacgttaagggattttggtcatgagattatcaaaaaggatcttcacctagatccttttaaattaaaaatgaagttttaaatcaatctaaagtatatatgagtaaacttggtctgacagttaccaatgcttaatcagtgaggcacctatctcagcgatctgtctatttcgttcatccatagttgcctgactccccgtcgtgtagataactacgatacgggagggcttaccatctggccccagtgctgcaatgataccgcgagacccacgctcaccggctccagatttatcagcaataaaccagccagccggaagggccgagcgcagaagtggtcctgcaactttatccgcctccatccagtctattaattgttgccgggaagctagagtaagtagttcgccagttaatagtttgcgcaacgttgttgccattgctacaggcatcgtggtgtcacgctcgtcgtttggtatggcttcattcagctccggttcccaacgatcaaggcgagttacatgatcccccatgttgtgcaaaaaagcggttagctccttcggtcctccgatcgttgtcagaagtaagttggccgcagtgttatcactcatggttatggcagcactgcataattctcttactgtcatgccatccgtaagatgcttttctgtgactggtgagtactcaaccaagtcattctgagaatagtgtatgcggcgaccgagttgctcttgcccggcgtcaatacgggataataccgcgccacatagcagaactttaaaagtgctcatcattggaaaacgttcttcggggcgaaaactctcaaggatcttaccgctgttgagatccagttcgatgtaacccactcgtgcacccaactgatcttcagcatcttttactttcaccagcgtttctgggtgagcaaaaacaggaaggcaaaatgccgcaaaaaagggaataagggcgacacggaaatgttgaatactcatactcttcctttttcaatattattgaagcatttatcagggttattgtctcatgagcggatacatatttgaatgtatttagaaaaataaacaaataggggttccgcgcacatttccccgaaaagtgccacctgacgtcgacggatcgggagatctcccgatcccctatggtgcactctcagtacaatctgctctgatgccgcatagttaagccagtatctgctccctgcttgtgtgttggaggtcgctgagtagtgcgcgagcaaaatttaagctacaacaaggcaaggcttgaccgacaattgcatgaagaatctgcttagggttaggcgttttgcgctgcttcgcgatgtacgggccagatatacgcgttgacattgattattgactagttattaatagtaatcaattacggggtcattagttcatagcccatatatggagttccgcgttacataacttacggtaaatggcccgcctggctgaccgcccaacgacccccgcccattgacgtcaataatgacgtatgttcccatagtaacgccaatagggactttccattgacgtcaatgggtggagtatttacggtaaactgcccacttggcagtacatcaagtgtatcatatgccaagtacgccccctattgacgtcaatgacggtaaatggcccgcctggcattatgcccagtacatgaccttatgggactttcctacttggcagtacatctacgtattagtcatcgctattaccatggtgatgcggttttggcagtacatcaatgggcgtggatagcggtttgactcacggggatttccaagtctccaccccattgacgtcaatgggagtttgttttggcaccaaaatcaacgggactttccaaaatgtcgtaacaactccgccccattgacgcaaatgggcggtaggcgtgtacggtgggaggtctatataagcagagctctctggctaactagagaacccactgcttactggcttatcgaaattaatacgactcactatagggagacccaagctggctagcgtttaaacttaagcttggtaccgagctcggatccgccaccatggttgccaataaggcctaccagttcagactgtacccaaccaaggaacaggagcagctgctggctaaaacctttggatgtgtgcggtttgtgtacaacaagatgctggaggaaagaatccagctgttcgagaagttcaaggacgatcaggagagcctgaaacaacaaacctgccctacccctgctaagtacaagaaggagttcccctggctgaaagaagtggacagcctggcactggctaacgcccagctgaacctgcaaaaggccttccagcactttttcagcggcagagccggcttccctaagttcaagaacagaaaggccaagcagagctatacaaccaacatggtgaacggcaacatcaagctgagcgacggatatatcaaactgcccaagctgaagtggatcaagttcaaacagcatagagagatccctgcccatcacatcatcaaaagctgcaccatcaccaagacaaagacaggcaagtactacatctctatcctgaccgagtacgagcaccagcctgccctgaaggaagtgcagaccgtggtgggcctggacttctccatgtcaacactgtacgtggacagcgaaggcaaacgggccaattaccctagattctaccgcaaggccctggaaaccctggccaaagaacagagaaagctgagcagaaagaagaagggcagcaacaggtggcacaagcagagactgaaggtggccaagctgcacgagaagatggccaaccagcggaaggacttcctgcacaaggaaagccacaagctggccaagagatacgactgtgtcgtcatcgaggacctgaatatgaaaggcatgtcccaggctctgcactttggccagggagtgcacgataacggctggggcatgttcaccacctttctccagtacaagctcgccgagcagggcaagaaactgatcaagatcgacaagtggttccccagctctaagacttgcagctgctgcggcagagtgaaggaatctctgagcctgtccgagagaacattccggtgcgagtgcggattcgaatctgatagagatgtgaacgccgctattaacatcaagcacgagggcatgaagcggttagccattgtgggcagcggctccggaaaacggacagccgacggaagcgagttcgagtcaccgaaaaagaagcgaaaagtttaatctagagggcccgtttaaacccgctgatcagcctcgactgtgccttctagttgccagccatctgttgtttgcccctcccccgtgccttccttgaccctggaaggtgccactcccactgtcctttcctaataaaatgaggaaattgcatcgcattgtctgagtaggtgtcattctattctggggggtggggtggggcaggacagcaagggggaggattgggaagacaatagcaggcatgctggggatgcggtgggctctatggcttctgaggcggaaagaaccagctggggctctagggggtatccccacgcgccctgtagcggcgcattaagcgcggcgggtgtggtggttacgcgcagcgtgaccgctacacttgccagcgccctagcgcccgctcctttcgctttcttcccttcctttctcgccacgttcgccggctttccccgtcaagctctaaatcgggggctccctttagggttccgatttagtgctttacggcacctcgaccccaaaaaacttgattagggtgatggttcacgtagtgggccatcgccctgatagacggtttttcgccctttgacgttggagtccacgttctttaatagtggactcttgttccaaactggaacaacactcaaccctatctcggtctattcttttgatttataagggattttgccgatttcggcctattggttaaaaaatgagctgatttaacaaaaatttaacgcgaattaattctgtggaatgtgtgtcagttagggtgtggaaagtccccaggctccccagcaggcagaagtatgcaaagcatgcatctcaattagtca

SEQ ID NO: 85 - DNA, 6698 bp, synthetic construct
  source 1..6698: mol_type = other DNA
gcaaccaggtgtggaaagtccccaggctccccagcaggcagaagtatgcaaagcatgcatctcaattagtcagcaaccatagtcccgcccctaactccgcccatcccgcccctaactccgcccagttccgcccattctccgccccatggctgactaattttttttatttatgcagaggccgaggccgcctctgcctctgagctattccagaagtagtgaggaggcttttttggaggcctaggcttttgcaaaaagctcccgggagcttgtatatccattttcggatctgatcaagagacaggatgaggatcgtttcgcatgattgaacaagatggattgcacgcaggttctccggccgcttgggtggagaggctattcggctatgactgggcacaacagacaatcggctgctctgatgccgccgtgttccggctgtcagcgcaggggcgcccggttctttttgtcaagaccgacctgtccggtgccctgaatgaactgcaggacgaggcagcgcggctatcgtggctggccacgacgggcgttccttgcgcagctgtgctcgacgttgtcactgaagcgggaagggactggctgctattgggcgaagtgccggggcaggatctcctgtcatctcaccttgctcctgccgagaaagtatccatcatggctgatgcaatgcggcggctgcatacgcttgatccggctacctgcccattcgaccaccaagcgaaacatcgcatcgagcgagcacgtactcggatggaagccggtcttgtcgatcaggatgatctggacgaagagcatcaggggctcgcgccagccgaactgttcgccaggctcaaggcgcgcatgcccgacggcgaggatctcgtcgtgacccatggcgatgcctgcttgccgaatatcatggtggaaaatggccgcttttctggattcatcgactgtggccggctgggtgtggcggaccgctatcaggacatagcgttggctacccgtgatattgctgaagagcttggcggcgaatgggctgaccgcttcctcgtgctttacggtatcgccgctcccgattcgcagcgcatcgccttctatcgccttcttgacgagttcttctgagcgggactctggggttcgaaatgaccgaccaagcgacgcccaacctgccatcacgagatttcgattccaccgccgccttctatgaaaggttgggcttcggaatcgttttccgggacgccggctggatgatcctccagcgcggggatctcatgctggagttcttcgcccaccccaacttgtttattgcagcttataatggttacaaataaagcaatagcatcacaaatttcacaaataaagcatttttttcactgcattctagttgtggtttgtccaaactcatcaatgtatcttatcatgtctgtataccgtcgacctctagctagagcttggcgtaatcatggtcatagctgtttcctgtgtgaaattgttatccgctcacaattccacacaacatacgagccggaagcataaagtgtaaagcctggggtgcctaatgagtgagctaactcacattaattgcgttgcgctcactgcccgctttccagtcgggaaacctgtcgtgccagctgcattaatgaatcggccaacgcgcggggagaggcggtttgcgtattgggcgctcttccgcttcctcgctcactgactcgctgcgctcggtcgttcggctgcggcgagcggtatcagctcactcaaaggcggtaatacggttatccacagaatcaggggataacgcaggaaagaacatgtgagcaaaaggccagcaaaaggccaggaaccgtaaaaaggccgcgttgctggcgtttttccataggctccgcccccctgacgagcatcacaaaaatcgacgctcaagtcagaggtggcgaaacccgacaggactataaagataccaggcgtttccccctggaagctccctcgtgcgctctcctgttccgaccctgccgcttaccggatacctgtccgcctttctcccttcgggaagcgtggcgctttctcatagctcacgctgtaggtatctcagttcggtgtaggtcgttcgctccaagctgggctgtgtgcacgaaccccccgttcagcccgaccgctgcgccttatccggtaactatcgtcttgagtccaacccggtaagacacgacttatcgccactggcagcagccactggtaacaggattagcagagcgaggtatgtaggcggtgctacagagttcttgaagtggtggcctaactacggctacactagaagaacagtatttggtatctgcgctctgctgaagccagttaccttcggaaaaagagttggtagctcttgatccggcaaacaaaccaccgctggtagcggtttttttgtttgcaagcagcagattacgcgcagaaaaaaaggatctcaagaagatcctttgatcttttctacggggtctgacgctcagtggaacgaaaactcacgttaagggattttggtcatgagattatcaaaaaggatcttcacctagatccttttaaattaaaaatgaagttttaaatcaatctaaagtatatatgagtaaacttggtctgacagttaccaatgcttaatcagtgaggcacctatctcagcgatctgtctatttcgttcatccatagttgcctgactccccgtcgtgtagataactacgatacgggagggcttaccatctggccccagtgctgcaatgataccgcgagacccacgctcaccggctccagatttatcagcaataaaccagccagccggaagggccgagcgcagaagtggtcctgcaactttatccgcctccatccagtctattaattgttgccgggaagctagagtaagtagttcgccagttaatagtttgcgcaacgttgttgccattgctacaggcatcgtggtgtcacgctcgtcgtttggtatggcttcattcagctccggttcccaacgatcaaggcgagttacatgatcccccatgttgtgcaaaaaagcggttagctccttcggtcctccgatcgttgtcagaagtaagttggccgcagtgttatcactcatggttatggcagcactgcataattctcttactgtcatgccatccgtaagatgcttttctgtgactggtgagtactcaaccaagtcattctgagaatagtgtatgcggcgaccgagttgctcttgcccggcgtcaatacgggataataccgcgccacatagcagaactttaaaagtgctcatcattggaaaacgttcttcggggcgaaaactctcaaggatcttaccgctgttgagatccagttcgatgtaacccactcgtgcacccaactgatcttcagcatcttttactttcaccagcgtttctgggtgagcaaaaacaggaaggcaaaatgccgcaaaaaagggaataagggcgacacggaaatgttgaatactcatactcttcctttttcaatattattgaagcatttatcagggttattgtctcatgagcggatacatatttgaatgtatttagaaaaataaacaaataggggttccgcgcacatttccccgaaaagtgccacctgacgtcgacggatcgggagatctcccgatcccctatggtgcactctcagtacaatctgctctgatgccgcatagttaagccagtatctgctccctgcttgtgtgttggaggtcgctgagtagtgcgcgagcaaaatttaagctacaacaaggcaaggcttgaccgacaattgcatgaagaatctgcttagggttaggcgttttgcgctgcttcgcgatgtacgggccagatatacgcgttgacattgattattgactagttattaatagtaatcaattacggggtcattagttcatagcccatatatggagttccgcgttacataacttacggtaaatggcccgcctggctgaccgcccaacgacccccgcccattgacgtcaataatgacgtatgttcccatagtaacgccaatagggactttccattgacgtcaatgggtggagtatttacggtaaactgcccacttggcagtacatcaagtgtatcatatgccaagtacgccccctattgacgtcaatgacggtaaatggcccgcctggcattatgcccagtacatgaccttatgggactttcctacttggcagtacatctacgtattagtcatcgctattaccatggtgatgcggttttggcagtacatcaatgggcgtggatagcggtttgactcacggggatttccaagtctccaccccattgacgtcaatgggagtttgttttggcaccaaaatcaacgggactttccaaaatgtcgtaacaactccgccccattgacgcaaatgggcggtaggcgtgtacggtgggaggtctatataagcagagctctctggctaactagagaacccactgcttactggcttatcgaaattaatacgactcactatagggagacccaagctggctagcgtttaaacttaagcttggtaccgagctcggatccgccaccatgggctacttctgcatcaagcaacagctgaacggactgaccaaagaggaatatctgacactgagagaactgtgccacattgccaagaatatgtacaacgtgggtctgtacaacgtgcggcagtactactttgaacataaggaatttctgaactatgaaaagaactaccacctggctaagacaaacgagaattacaagctgctgaacagcaacatggcccagcagatcctgaaaaaggtgaatgaggccttcaagagctttttcggcctgatcagcctggccaagcagggcaagtacgatcacaaggccatcagcatccctaagtatctgaagaaagacggcttccactctctgattatcggccagatcagaatcgacggaaacaagttcacaatcccttacagcagactgtttaagaaaacccacaaacctatcaccatcaccattccccccgtcctgctggacaagaagatcaaacaaatcgagatcatcccaaagcaccacgccagattcttcgagatccagtacaagtacgagatgcctgaagatcagagagagctgaatgaccaaaaagccctggctatcgacctgggcctgaacaacctggctacatgcgtgacctctgatggccggagcttcatcatcgatggcaggcggctgaagtccatcaatcagtggttcaacaaagagaacgccagactgcagagcattaaggataagcagaagatcaagggcaccaccagaaagcaggctctgctggccatgaaccggaacaacaaggtgaacgactacatcaacaagacctgtagatacatcatcaactactgcatcgagaaccagatcggaaaactggttatcggctacgccgagacatggcagcggaacatgaacctgggcaagaaaacaaaccagaacttcgtgaacatccctctgggaaatatcaaagagaagctggaatacctttgtgagttctacggcatcgagttcctgaagcaggaggaatcctacaccagccaggccagcttcttcgacggcgacgagatccccgagtataatgccgacaaccctaaggaatacaagttcagcggcaaaagaatcaagcggggcctctacagaaccaagtctggaaagctgatcaacgccgatgtgaacggcgccttgaatatcctgaagaagtctaaggccgtggacctgtccgtgctctgcagcagcggcgaggtggacacccctcagagaatcagaatcgccggcagcggctccggaaaacggacagccgacggaagcgagttcgagtcaccgaaaaagaagcgaaaagtttaatctagagggcccgtttaaacccgctgatcagcctcgactgtgccttctagttgccagccatctgttgtttgcccctcccccgtgccttccttgaccctggaaggtgccactcccactgtcctttcctaataaaatgaggaaattgcatcgcattgtctgagtaggtgtcattctattctggggggtggggtggggcaggacagcaagggggaggattgggaagacaatagcaggcatgctggggatgcggtgggctctatggcttctgaggcggaaagaaccagctggggctctagggggtatccccacgcgccctgtagcggcgcattaagcgcggcgggtgtggtggttacgcgcagcgtgaccgctacacttgccagcgccctagcgcccgctcctttcgctttcttcccttcctttctcgccacgttcgccggctttccccgtcaagctctaaatcgggggctccctttagggttccgatttagtgctttacggcacctcgaccccaaaaaacttgattagggtgatggttcacgtagtgggccatcgccctgatagacggtttttcgccctttgacgttggagtccacgttctttaatagtggactcttgttccaaactggaacaacactcaaccctatctcggtctattcttttgatttataagggattttgccgatttcggcctattggttaaaaaatgagctgatttaacaaaaatttaacgcgaattaattctgtggaatgtgtgtcagttagggtgtggaaagtccccaggctccccagcaggcagaagtatgcaaagcatgcatctcaattagtca

SEQ ID NO: 86 - DNA, 6629 bp, synthetic construct
  source 1..6629: mol_type = other DNA
gcaaccaggtgtggaaagtccccaggctccccagcaggcagaagtatgcaaagcatgcatctcaattagtcagcaaccatagtcccgcccctaactccgcccatcccgcccctaactccgcccagttccgcccattctccgccccatggctgactaattttttttatttatgcagaggccgaggccgcctctgcctctgagctattccagaagtagtgaggaggcttttttggaggcctaggcttttgcaaaaagctcccgggagcttgtatatccattttcggatctgatcaagagacaggatgaggatcgtttcgcatgattgaacaagatggattgcacgcaggttctccggccgcttgggtggagaggctattcggctatgactgggcacaacagacaatcggctgctctgatgccgccgtgttccggctgtcagcgcaggggcgcccggttctttttgtcaagaccgacctgtccggtgccctgaatgaactgcaggacgaggcagcgcggctatcgtggctggccacgacgggcgttccttgcgcagctgtgctcgacgttgtcactgaagcgggaagggactggctgctattgggcgaagtgccggggcaggatctcctgtcatctcaccttgctcctgccgagaaagtatccatcatggctgatgcaatgcggcggctgcatacgcttgatccggctacctgcccattcgaccaccaagcgaaacatcgcatcgagcgagcacgtactcggatggaagccggtcttgtcgatcaggatgatctggacgaagagcatcaggggctcgcgccagccgaactgttcgccaggctcaaggcgcgcatgcccgacggcgaggatctcgtcgtgacccatggcgatgcctgcttgccgaatatcatggtggaaaatggccgcttttctggattcatcgactgtggccggctgggtgtggcggaccgctatcaggacatagcgttggctacccgtgatattgctgaagagcttggcggcgaatgggctgaccgcttcctcgtgctttacggtatcgccgctcccgattcgcagcgcatcgccttctatcgccttcttgacgagttcttctgagcgggactctggggttcgaaatgaccgaccaagcgacgcccaacctgccatcacgagatttcgattccaccgccgccttctatgaaaggttgggcttcggaatcgttttccgggacgccggctggatgatcctccagcgcggggatctcatgctggagttcttcgcccaccccaacttgtttattgcagcttataatggttacaaataaagcaatagcatcacaaatttcacaaataaagcatttttttcactgcattctagttgtggtttgtccaaactcatcaatgtatcttatcatgtctgtataccgtcgacctctagctagagcttggcgtaatcatggtcatagctgtttcctgtgtgaaattgttatccgctcacaattccacacaacatacgagccggaagcataaagtgtaaagcctggggtgcctaatgagtgagctaactcacattaattgcgttgcgctcactgcccgctttccagtcgggaaacctgtcgtgccagctgcattaatgaatcggccaacgcgcggggagaggcggtttgcgtattgggcgctcttccgcttcctcgctcactgactcgctgcgctcggtcgttcggctgcggcgagcggtatcagctcactcaaaggcggtaatacggttatccacagaatcaggggataacgcaggaaagaacatgtgagcaaaaggccagcaaaaggccaggaaccgtaaaaaggccgcgttgctggcgtttttccataggctccgcccccctgacgagcatcacaaaaatcgacgctcaagtcagaggtggcgaaacccgacaggactataaagataccaggcgtttccccctggaagctccctcgtgcgctctcctgttccgaccctgccgcttaccggatacctgtccgcctttctcccttcgggaagcgtggcgctttctcatagctcacgctgtaggtatctcagttcggtgtaggtcgttcgctccaagctgggctgtgtgcacgaaccccccgttcagcccgaccgctgcgccttatccggtaactatcgtcttgagtccaacccggtaagacacgacttatcgccactggcagcagccactggtaacaggattagcagagcgaggtatgtaggcggtgctacagagttcttgaagtggtggcctaactacggctacactagaagaacagtatttggtatctgcgctctgctgaagccagttaccttcggaaaaagagttggtagctcttgatccggcaaacaaaccaccgctggtagcggtttttttgtttgcaagcagcagattacgcgcagaaaaaaaggatctcaagaagatcctttgatcttttctacggggtctgacgctcagtggaacgaaaactcacgttaagggattttggtcatgagattatcaaaaaggatcttcacctagatccttttaaattaaaaatgaagttttaaatcaatctaaagtatatatgagtaaacttggtctgacagttaccaatgcttaatcagtgaggcacctatctcagcgatctgtctatttcgttcatccatagttgcctgactccccgtcgtgtagataactacgatacgggagggcttaccatctggccccagtgctgcaatgataccgcgagacccacgctcaccggctccagatttatcagcaataaaccagccagccggaagggccgagcgcagaagtggtcctgcaactttatccgcctccatccagtctattaattgttgccgggaagctagagtaagtagttcgccagttaatagtttgcgcaacgttgttgccattgctacaggcatcgtggtgtcacgctcgtcgtttggtatggcttcattcagctccggttcccaacgatcaaggcgagttacatgatcccccatgttgtgcaaaaaagcggttagctccttcggtcctccgatcgttgtcagaagtaagttggccgcagtgttatcactcatggttatggcagcactgcataattctcttactgtcatgccatccgtaagatgcttttctgtgactggtgagtactcaaccaagtcattctgagaatagtgtatgcggcgaccgagttgctcttgcccggcgtcaatacgggataataccgcgccacatagcagaactttaaaagtgctcatcattggaaaacgttcttcggggcgaaaactctcaaggatcttaccgctgttgagatccagttcgatgtaacccactcgtgcacccaactgatcttcagcatcttttactttcaccagcgtttctgggtgagcaaaaacaggaaggcaaaatgccgcaaaaaagggaataagggcgacacggaaatgttgaatactcatactcttcctttttcaatattattgaagcatttatcagggttattgtctcatgagcggatacatatttgaatgtatttagaaaaataaacaaataggggttccgcgcacatttccccgaaaagtgccacctgacgtcgacggatcgggagatctcccgatcccctatggtgcactctcagtacaatctgctctgatgccgcatagttaagccagtatctgctccctgcttgtgtgttggaggtcgctgagtagtgcgcgagcaaaatttaagctacaacaaggcaaggcttgaccgacaattgcatgaagaatctgcttagggttaggcgttttgcgctgcttcgcgatgtacgggccagatatacgcgttgacattgattattgactagttattaatagtaatcaattacggggtcattagttcatagcccatatatggagttccgcgttacataacttacggtaaatggcccgcctggctgaccgcccaacgacccccgcccattgacgtcaataatgacgtatgttcccatagtaacgccaatagggactttccattgacgtcaatgggtggagtatttacggtaaactgcccacttggcagtacatcaagtgtatcatatgccaagtacgccccctattgacgtcaatgacggtaaatggcccgcctggcattatgcccagtacatgaccttatgggactttcctacttggcagtacatctacgtattagtcatcgctattaccatggtgatgcggttttggcagtacatcaatgggcgtggatagcggtttgactcacggggatttccaagtctccaccccattgacgtcaatgggagtttgttttggcaccaaaatcaacgggactttccaaaatgtcgtaacaactccgccccattgacgcaaatgggcggtaggcgtgtacggtgggaggtctatataagcagagctctctggctaactagagaacccactgcttactggcttatcgaaattaatacgactcactatagggagacccaagctggctagcgtttaaacttaagcttggtaccgagctcggatccgccaccatgggctacagaacactgaaaaccagattcagagctaaaaaggaagtgatccaaaagctctttgagtgcaacagaatcagcgccgaggtgtggaacgagtgtctgcggctggccaaggagcaccacctggaaaccggcaagtggatcacaaagaccgagcttcagaaggccacaaagggaagattcagcatccacagccagtctatccaggccgtggtgcacaagtatatcttcgccagagatggagccaaggaagctagaaagaagggcgagaagattaagtacccctacaagaagaaaaagcacttcaacaccaagtgggccaaggacggcttcgtgctgcacgaggacggaaccctggaactgtccctgggcatttggaatcggaagcggcagagccctctggtggtgaagatcgacaaggaaaagctgcctaacggcaaagtgaaggaaattgagctggtctacgacagaggcctgtggctgtgcctgagctacgaggatggaaagaagcccaaggagaacccctgcaagaaccgggtggccatcgatcctggcgagatccacaccatcgccgctatctgcgagaatggcgaatctctgatcatcacaggcagaaagatcaggtccatccatagactgagaaacaagaaactgaaggaactgcagaaactcatgagcagatgcaaaaaaggcagcaagcagtggaagaagtacaacagagccaaacagtacgtgctgtctaaaagcgaggcccagctgaaagatgccctgcataagacaaccagacagttcgtgcggtggtgcctggaaaaccaggtgaaagaggtcgttatcggcgacatcgagggcatccagcggaatactaaaaaaaagcggaacaagaaaaccaaccagaagctgagcaactggtcctttggcaagctgttcgactacctgaagtacaagctgaacgccgaaggcatccaaatcgagaaaaaggacgagtcttacaccagccagacctgtcctgtgtgcggcaagaagaacaaaagcagcagcagaaattacacatgccagtgcggatataagagacacagagacatccacggcgccatgaacctgtttgctaaggtgtactacggcgagatccggcctctggagttcaccgtgaagccattcacctaccggagaatcgccggcagcggctccggaaaacggacagccgacggaagcgagttcgagtcaccgaaaaagaagcgaaaagtttaatctagagggcccgtttaaacccgctgatcagcctcgactgtgccttctagttgccagccatctgttgtttgcccctcccccgtgccttccttgaccctggaaggtgccactcccactgtcctttcctaataaaatgaggaaattgcatcgcattgtctgagtaggtgtcattctattctggggggtggggtggggcaggacagcaagggggaggattgggaagacaatagcaggcatgctggggatgcggtgggctctatggcttctgaggcggaaagaaccagctggggctctagggggtatccccacgcgccctgtagcggcgcattaagcgcggcgggtgtggtggttacgcgcagcgtgaccgctacacttgccagcgccctagcgcccgctcctttcgctttcttcccttcctttctcgccacgttcgccggctttccccgtcaagctctaaatcgggggctccctttagggttccgatttagtgctttacggcacctcgaccccaaaaaacttgattagggtgatggttcacgtagtgggccatcgccctgatagacggtttttcgccctttgacgttggagtccacgttctttaatagtggactcttgttccaaactggaacaacactcaaccctatctcggtctattcttttgatttataagggattttgccgatttcggcctattggttaaaaaatgagctgatttaacaaaaatttaacgcgaattaattctgtggaatgtgtgtcagttagggtgtggaaagtccccaggctccccagcaggcagaagtatgcaaagcatgcatctcaattagtca

SEQ ID NO: 87 - DNA, 6566 bp, synthetic construct
  source 1..6566: mol_type = other DNA
gcaaccaggtgtggaaagtccccaggctccccagcaggcagaagtatgcaaagcatgcatctcaattagtcagcaaccatagtcccgcccctaactccgcccatcccgcccctaactccgcccagttccgcccattctccgccccatggctgactaattttttttatttatgcagaggccgaggccgcctctgcctctgagctattccagaagtagtgaggaggcttttttggaggcctaggcttttgcaaaaagctcccgggagcttgtatatccattttcggatctgatcaagagacaggatgaggatcgtttcgcatgattgaacaagatggattgcacgcaggttctccggccgcttgggtggagaggctattcggctatgactgggcacaacagacaatcggctgctctgatgccgccgtgttccggctgtcagcgcaggggcgcccggttctttttgtcaagaccgacctgtccggtgccctgaatgaactgcaggacgaggcagcgcggctatcgtggctggccacgacgggcgttccttgcgcagctgtgctcgacgttgtcactgaagcgggaagggactggctgctattgggcgaagtgccggggcaggatctcctgtcatctcaccttgctcctgccgagaaagtatccatcatggctgatgcaatgcggcggctgcatacgcttgatccggctacctgcccattcgaccaccaagcgaaacatcgcatcgagcgagcacgtactcggatggaagccggtcttgtcgatcaggatgatctggacgaagagcatcaggggctcgcgccagccgaactgttcgccaggctcaaggcgcgcatgcccgacggcgaggatctcgtcgtgacccatggcgatgcctgcttgccgaatatcatggtggaaaatggccgcttttctggattcatcgactgtggccggctgggtgtggcggaccgctatcaggacatagcgttggctacccgtgatattgctgaagagcttggcggcgaatgggctgaccgcttcctcgtgctttacggtatcgccgctcccgattcgcagcgcatcgccttctatcgccttcttgacgagttcttctgagcgggactctggggttcgaaatgaccgaccaagcgacgcccaacctgccatcacgagatttcgattccaccgccgccttctatgaaaggttgggcttcggaatcgttttccgggacgccggctggatgatcctccagcgcggggatctcatgctggagttcttcgcccaccccaacttgtttattgcagcttataatggttacaaataaagcaatagcatcacaaatttcacaaataaagcatttttttcactgcattctagttgtggtttgtccaaactcatcaatgtatcttatcatgtctgtataccgtcgacctctagctagagcttggcgtaatcatggtcatagctgtttcctgtgtgaaattgttatccgctcacaattccacacaacatacgagccggaagcataaagtgtaaagcctggggtgcctaatgagtgagctaactcacattaattgcgttgcgctcactgcccgctttccagtcgggaaacctgtcgtgccagctgcattaatgaatcggccaacgcgcggggagaggcggtttgcgtattgggcgctcttccgcttcctcgctcactgactcgctgcgctcggtcgttcggctgcggcgagcggtatcagctcactcaaaggcggtaatacggttatccacagaatcaggggataacgcaggaaagaacatgtgagcaaaaggccagcaaaaggccaggaaccgtaaaaaggccgcgttgctggcgtttttccataggctccgcccccctgacgagcatcacaaaaatcgacgctcaagtcagaggtggcgaaacccgacaggactataaagataccaggcgtttccccctggaagctccctcgtgcgctctcctgttccgaccctgccgcttaccggatacctgtccgcctttctcccttcgggaagcgtggcgctttctcatagctcacgctgtaggtatctcagttcggtgtaggtcgttcgctccaagctgggctgtgtgcacgaaccccccgttcagcccgaccgctgcgccttatccggtaactatcgtcttgagtccaacccggtaagacacgacttatcgccactggcagcagccactggtaacaggattagcagagcgaggtatgtaggcggtgctacagagttcttgaagtggtggcctaactacggctacactagaagaacagtatttggtatctgcgctctgctgaagccagttaccttcggaaaaagagttggtagctcttgatccggcaaacaaaccaccgctggtagcggtttttttgtttgcaagcagcagattacgcgcagaaaaaaaggatctcaagaagatcctttgatcttttctacggggtctgacgctcagtggaacgaaaactcacgttaagggattttggtcatgagattatcaaaaaggatcttcacctagatccttttaaattaaaaatgaagttttaaatcaatctaaagtatatatgagtaaacttggtctgacagttaccaatgcttaatcagtgaggcacctatctcagcgatctgtctatttcgttcatccatagttgcctgactccccgtcgtgtagataactacgatacgggagggcttaccatctggccccagtgctgcaatgataccgcgagacccacgctcaccggctccagatttatcagcaataaaccagccagccggaagggccgagcgcagaagtggtcctgcaactttatccgcctccatccagtctattaattgttgccgggaagctagagtaagtagttcgccagttaatagtttgcgcaacgttgttgccattgctacaggcatcgtggtgtcacgctcgtcgtttggtatggcttcattcagctccggttcccaacgatcaaggcgagttacatgatcccccatgttgtgcaaaaaagcggttagctccttcggtcctccgatcgttgtcagaagtaagttggccgcagtgttatcactcatggttatggcagcactgcataattctcttactgtcatgccatccgtaagatgcttttctgtgactggtgagtactcaaccaagtcattctgagaatagtgtatgcggcgaccgagttgctcttgcccggcgtcaatacgggataataccgcgccacatagcagaactttaaaagtgctcatcattggaaaacgttcttcggggcgaaaactctcaaggatcttaccgctgttgagatccagttcgatgtaacccactcgtgcacccaactgatcttcagcatcttttactttcaccagcgtttctgggtgagcaaaaacaggaaggcaaaatgccgcaaaaaagggaataagggcgacacggaaatgttgaatactcatactcttcctttttcaatattattgaagcatttatcagggttattgtctcatgagcggatacatatttgaatgtatttagaaaaataaacaaataggggttccgcgcacatttccccgaaaagtgccacctgacgtcgacggatcgggagatctcccgatcccctatggtgcactctcagtacaatctgctctgatgccgcatagttaagccagtatctgctccctgcttgtgtgttggaggtcgctgagtagtgcgcgagcaaaatttaagctacaacaaggcaaggcttgaccgacaattgcatgaagaatctgcttagggttaggcgttttgcgctgcttcgcgatgtacgggccagatatacgcgttgacattgattattgactagttattaatagtaatcaattacggggtcattagttcatagcccatatatggagttccgcgttacataacttacggtaaatggcccgcctggctgaccgcccaacgacccccgcccattgacgtcaataatgacgtatgttcccatagtaacgccaatagggactttccattgacgtcaatgggtggagtatttacggtaaactgcccacttggcagtacatcaagtgtatcatatgccaagtacgccccctattgacgtcaatgacggtaaatggcccgcctggcattatgcccagtacatgaccttatgggactttcctacttggcagtacatctacgtattagtcatcgctattaccatggtgatgcggttttggcagtacatcaatgggcgtggatagcggtttgactcacggggatttccaagtctccaccccattgacgtcaatgggagtttgttttggcaccaaaatcaacgggactttccaaaatgtcgtaacaactccgccccattgacgcaaatgggcggtaggcgtgtacggtgggaggtctatataagcagagctctctggctaactagagaacccactgcttactggcttatcgaaattaatacgactcactatagggagacccaagctggctagcgtttaaacttaagcttggtaccgagctcggatccgccaccatggatatgaccctcacagctaagatcaagatctaccctaccgccgagcaggccgaggtgctgaaggctacactgagcgcctatcggcaagcctgcaacgccgtcagcgtggtgatctttgacaccaaggttctggctcaggctaagctgcatgatatgacctaccgactgctgagaagcaattacgcccttagaagccaaatggcccagtctgtgatcaagaccgtgatcgccagataccgctccctgaaaagcaacggccacgagtggaccctggttagattcaagaagcccgagtatgacctggtgtggaaccgggattacagcatcgtgcagggactgttcagcgtgaataccctggaaggcagaattaaagtgtccttcgagcctaagggaatggaaccatacttcgacggctcttggaccttcggcaccgccaaactggtgtacaagcacaacaagttcttcctgcacatccctatgaccaagacaatccccacagtggacgagcacaatatcagacaggtggtgggagtggacgtgggcgtgaacttcctggccgtggcctacgacagccagggcaagacaatttttttcaacggcagaaagatcaagcacatgagagccaagtacaaaagaatgagaaagaccctgcaacagaagggcacagcctctgcccgtagaaagctgaaaaccatcggccagcgggaaaacagatggatgactgatgtgaaccacgccgtgaccaaagccctggtgagacagtacggtgagcggacactgtttgtcctggaagatctgaccggcatccgggaaaagaccgagcgggtgagaatccacgacagatacgagacagtgtcctgggccttctaccagttcagacagatgctggaatataaagccagactgcacggcagcaaggtgatcgtggtcgctcctcactacaccagcctgacatgccctaagtgcggccataccgagaaggccaacaggaaaaagcggacccacaccttctgctgtagaacctgtggctacacatctaacgacgacagaatcggagccatgaacctgcagagaaagggcatcgagtacatcgtggaaggcaccacccaggctggcagcggctccggaaaacggacagccgacggaagcgagttcgagtcaccgaaaaagaagcgaaaagtttaatctagagggcccgtttaaacccgctgatcagcctcgactgtgccttctagttgccagccatctgttgtttgcccctcccccgtgccttccttgaccctggaaggtgccactcccactgtcctttcctaataaaatgaggaaattgcatcgcattgtctgagtaggtgtcattctattctggggggtggggtggggcaggacagcaagggggaggattgggaagacaatagcaggcatgctggggatgcggtgggctctatggcttctgaggcggaaagaaccagctggggctctagggggtatccccacgcgccctgtagcggcgcattaagcgcggcgggtgtggtggttacgcgcagcgtgaccgctacacttgccagcgccctagcgcccgctcctttcgctttcttcccttcctttctcgccacgttcgccggctttccccgtcaagctctaaatcgggggctccctttagggttccgatttagtgctttacggcacctcgaccccaaaaaacttgattagggtgatggttcacgtagtgggccatcgccctgatagacggtttttcgccctttgacgttggagtccacgttctttaatagtggactcttgttccaaactggaacaacactcaaccctatctcggtctattcttttgatttataagggattttgccgatttcggcctattggttaaaaaatgagctgatttaacaaaaatttaacgcgaattaattctgtggaatgtgtgtcagttagggtgtggaaagtccccaggctccccagcaggcagaagtatgcaaagcatgcatctcaattagtca

SEQ ID NO: 88 - DNA, 6710 bp, synthetic construct
  source 1..6710: mol_type = other DNA
gcaaccaggtgtggaaagtccccaggctccccagcaggcagaagtatgcaaagcatgcatctcaattagtcagcaaccatagtcccgcccctaactccgcccatcccgcccctaactccgcccagttccgcccattctccgccccatggctgactaattttttttatttatgcagaggccgaggccgcctctgcctctgagctattccagaagtagtgaggaggcttttttggaggcctaggcttttgcaaaaagctcccgggagcttgtatatccattttcggatctgatcaagagacaggatgaggatcgtttcgcatgattgaacaagatggattgcacgcaggttctccggccgcttgggtggagaggctattcggctatgactgggcacaacagacaatcggctgctctgatgccgccgtgttccggctgtcagcgcaggggcgcccggttctttttgtcaagaccgacctgtccggtgccctgaatgaactgcaggacgaggcagcgcggctatcgtggctggccacgacgggcgttccttgcgcagctgtgctcgacgttgtcactgaagcgggaagggactggctgctattgggcgaagtgccggggcaggatctcctgtcatctcaccttgctcctgccgagaaagtatccatcatggctgatgcaatgcggcggctgcatacgcttgatccggctacctgcccattcgaccaccaagcgaaacatcgcatcgagcgagcacgtactcggatggaagccggtcttgtcgatcaggatgatctggacgaagagcatcaggggctcgcgccagccgaactgttcgccaggctcaaggcgcgcatgcccgacggcgaggatctcgtcgtgacccatggcgatgcctgcttgccgaatatcatggtggaaaatggccgcttttctggattcatcgactgtggccggctgggtgtggcggaccgctatcaggacatagcgttggctacccgtgatattgctgaagagcttggcggcgaatgggctgaccgcttcctcgtgctttacggtatcgccgctcccgattcgcagcgcatcgccttctatcgccttcttgacgagttcttctgagcgggactctggggttcgaaatgaccgaccaagcgacgcccaacctgccatcacgagatttcgattccaccgccgccttctatgaaaggttgggcttcggaatcgttttccgggacgccggctggatgatcctccagcgcggggatctcatgctggagttcttcgcccaccccaacttgtttattgcagcttataatggttacaaataaagcaatagcatcacaaatttcacaaataaagcatttttttcactgcattctagttgtggtttgtccaaactcatcaatgtatcttatcatgtctgtataccgtcgacctctagctagagcttggcgtaatcatggtcatagctgtttcctgtgtgaaattgttatccgctcacaattccacacaacatacgagccggaagcataaagtgtaaagcctggggtgcctaatgagtgagctaactcacattaattgcgttgcgctcactgcccgctttccagtcgggaaacctgtcgtgccagctgcattaatgaatcggccaacgcgcggggagaggcggtttgcgtattgggcgctcttccgcttcctcgctcactgactcgctgcgctcggtcgttcggctgcggcgagcggtatcagctcactcaaaggcggtaatacggttatccacagaatcaggggataacgcaggaaagaacatgtgagcaaaaggccagcaaaaggccaggaaccgtaaaaaggccgcgttgctggcgtttttccataggctccgcccccctgacgagcatcacaaaaatcgacgctcaagtcagaggtggcgaaacccgacaggactataaagataccaggcgtttccccctggaagctccctcgtgcgctctcctgttccgaccctgccgcttaccggatacctgtccgcctttctcccttcgggaagcgtggcgctttctcatagctcacgctgtaggtatctcagttcggtgtaggtcgttcgctccaagctgggctgtgtgcacgaaccccccgttcagcccgaccgctgcgccttatccggtaactatcgtcttgagtccaacccggtaagacacgacttatcgccactggcagcagccactggtaacaggattagcagagcgaggtatgtaggcggtgctacagagttcttgaagtggtggcctaactacggctacactagaagaacagtatttggtatctgcgctctgctgaagccagttaccttcggaaaaagagttggtagctcttgatccggcaaacaaaccaccgctggtagcggtttttttgtttgcaagcagcagattacgcgcagaaaaaaaggatctcaagaagatcctttgatcttttctacggggtctgacgctcagtggaacgaaaactcacgttaagggattttggtcatgagattatcaaaaaggatcttcacctagatccttttaaattaaaaatgaagttttaaatcaatctaaagtatatatgagtaaacttggtctgacagttaccaatgcttaatcagtgaggcacctatctcagcgatctgtctatttcgttcatccatagttgcctgactccccgtcgtgtagataactacgatacgggagggcttaccatctggccccagtgctgcaatgataccgcgagacccacgctcaccggctccagatttatcagcaataaaccagccagccggaagggccgagcgcagaagtggtcctgcaactttatccgcctccatccagtctattaattgttgccgggaagctagagtaagtagttcgccagttaatagtttgcgcaacgttgttgccattgctacaggcatcgtggtgtcacgctcgtcgtttggtatggcttcattcagctccggttcccaacgatcaaggcgagttacatgatcccccatgttgtgcaaaaaagcggttagctccttcggtcctccgatcgttgtcagaagtaagttggccgcagtgttatcactcatggttatggcagcactgcataattctcttactgtcatgccatccgtaagatgcttttctgtgactggtgagtactcaaccaagtcattctgagaatagtgtatgcggcgaccgagttgctcttgcccggcgtcaatacgggataataccgcgccacatagcagaactttaaaagtgctcatcattggaaaacgttcttcggggcgaaaactctcaaggatcttaccgctgttgagatccagttcgatgtaacccactcgtgcacccaactgatcttcagcatcttttactttcaccagcgtttctgggtgagcaaaaacaggaaggcaaaatgccgcaaaaaagggaataagggcgacacggaaatgttgaatactcatactcttcctttttcaatattattgaagcatttatcagggttattgtctcatgagcggatacatatttgaatgtatttagaaaaataaacaaataggggttccgcgcacatttccccgaaaagtgccacctgacgtcgacggatcgggagatctcccgatcccctatggtgcactctcagtacaatctgctctgatgccgcatagttaagccagtatctgctccctgcttgtgtgttggaggtcgctgagtagtgcgcgagcaaaatttaagctacaacaaggcaaggcttgaccgacaattgcatgaagaatctgcttagggttaggcgttttgcgctgcttcgcgatgtacgggccagatatacgcgttgacattgattattgactagttattaatagtaatcaattacggggtcattagttcatagcccatatatggagttccgcgttacataacttacggtaaatggcccgcctggctgaccgcccaacgacccccgcccattgacgtcaataatgacgtatgttcccatagtaacgccaatagggactttccattgacgtcaatgggtggagtatttacggtaaactgcccacttggcagtacatcaagtgtatcatatgccaagtacgccccctattgacgtcaatgacggtaaatggcccgcctggcattatgcccagtacatgaccttatgggactttcctacttggcagtacatctacgtattagtcatcgctattaccatggtgatgcggttttggcagtacatcaatgggcgtggatagcggtttgactcacggggatttccaagtctccaccccattgacgtcaatgggagtttgttttggcaccaaaatcaacgggactttccaaaatgtcgtaacaactccgccccattgacgcaaatgggcggtaggcgtgtacggtgggaggtctatataagcagagctctctggctaactagagaacccactgcttactggcttatcgaaattaatacgactcactatagggagacccaagctggctagcgtttaaacttaagcttggtaccgagctcggatccgccaccatgggctttgtgtacatcatcaacaagcacggcaagcccctgatgccatgtagccctagaaaggccagactgctcctcaagcagaagaaggctaaggtggtgcgcagaacacctttcaccatccagctgctgtatggcagctctggctataagcagcctgtgtccctgggcgtggacatgggcacaagacacgttggcatcagcgccaccaccaagaaggatgtgctgttcgaggctgaagctcagctgagaaccgacatcgtggaactgctggccatcagaaggcaatttagaagaagcagaagaaacagaaagaccagatacagagaagccagattcctgaaccggcggaaacctgagggctggctgcctcctagcatccaacacaagatcaacagccacattaagctgatcgacctggtgcataatatcctgcccgtcaccagcgtgaccatcgaggtggccgccttcgacacccagaaactgaaaaacctgaacatccggggcgttgagtaccagcagggcgagcagatgggtttctggaacgtgcgggaatacgtgctgtaccgggacaaccacacatgccagtactgcaagggaaagaaaaaagaccccgtgctgcaagtgcaccacatcgagagccggaaaacaggaggcgattcccctgataatctgattaccctgtgcaagacctgtcaccatgagatccacgagaaaggactggaacacatctttcaaagaaagcggcctccaatgagagatgcctcccagatgaccgccatgcggtgggccatgttcagcagaatcagagagaagtacagccacgccaatatcacctacggctacatcacaaagtgcatcagaatcgccaacggcctgagcaagagccacatggtggacgccagatgcatcagcggaaaccccctggccaagccttctggaacagtgtacctgctgaagttcgtgcggaagaacaacagacagctgcacaaggccacaatcctgaagggcggcaagagaaagtccaacaaggcccctagattcgtgaagggcttccagctttttgataaggtcgtgtacgagagaaaagagtgcttcatcttcggcagacggagcagcggctacttcgacctgcggctgctggacggcaccaaggtgcacgcctctgccagctggaagaaactgaaaagagtggaacacgcttctacactgctgattgaaagacgcaagggcgacagcagccccaccttcgccctggctggcagcggctccggaaaacggacagccgacggaagcgagttcgagtcaccgaaaaagaagcgaaaagtttaatctagagggcccgtttaaacccgctgatcagcctcgactgtgccttctagttgccagccatctgttgtttgcccctcccccgtgccttccttgaccctggaaggtgccactcccactgtcctttcctaataaaatgaggaaattgcatcgcattgtctgagtaggtgtcattctattctggggggtggggtggggcaggacagcaagggggaggattgggaagacaatagcaggcatgctggggatgcggtgggctctatggcttctgaggcggaaagaaccagctggggctctagggggtatccccacgcgccctgtagcggcgcattaagcgcggcgggtgtggtggttacgcgcagcgtgaccgctacacttgccagcgccctagcgcccgctcctttcgctttcttcccttcctttctcgccacgttcgccggctttccccgtcaagctctaaatcgggggctccctttagggttccgatttagtgctttacggcacctcgaccccaaaaaacttgattagggtgatggttcacgtagtgggccatcgccctgatagacggtttttcgccctttgacgttggagtccacgttctttaatagtggactcttgttccaaactggaacaacactcaaccctatctcggtctattcttttgatttataagggattttgccgatttcggcctattggttaaaaaatgagctgatttaacaaaaatttaacgcgaattaattctgtggaatgtgtgtcagttagggtgtggaaagtccccaggctccccagcaggcagaagtatgcaaagcatgcatctcaattagtca

SEQ ID NO: 89 - DNA, 5846 bp, synthetic construct
  source 1..5846: mol_type = other DNA
gcaaccaggtgtggaaagtccccaggctccccagcaggcagaagtatgcaaagcatgcatctcaattagtcagcaaccatagtcccgcccctaactccgcccatcccgcccctaactccgcccagttccgcccattctccgccccatggctgactaattttttttatttatgcagaggccgaggccgcctctgcctctgagctattccagaagtagtgaggaggcttttttggaggcctaggcttttgcaaaaagctcccgggagcttgtatatccattttcggatctgatcaagagacaggatgaggatcgtttcgcatgattgaacaagatggattgcacgcaggttctccggccgcttgggtggagaggctattcggctatgactgggcacaacagacaatcggctgctctgatgccgccgtgttccggctgtcagcgcaggggcgcccggttctttttgtcaagaccgacctgtccggtgccctgaatgaactgcaggacgaggcagcgcggctatcgtggctggccacgacgggcgttccttgcgcagctgtgctcgacgttgtcactgaagcgggaagggactggctgctattgggcgaagtgccggggcaggatctcctgtcatctcaccttgctcctgccgagaaagtatccatcatggctgatgcaatgcggcggctgcatacgcttgatccggctacctgcccattcgaccaccaagcgaaacatcgcatcgagcgagcacgtactcggatggaagccggtcttgtcgatcaggatgatctggacgaagagcatcaggggctcgcgccagccgaactgttcgccaggctcaaggcgcgcatgcccgacggcgaggatctcgtcgtgacccatggcgatgcctgcttgccgaatatcatggtggaaaatggccgcttttctggattcatcgactgtggccggctgggtgtggcggaccgctatcaggacatagcgttggctacccgtgatattgctgaagagcttggcggcgaatgggctgaccgcttcctcgtgctttacggtatcgccgctcccgattcgcagcgcatcgccttctatcgccttcttgacgagttcttctgagcgggactctggggttcgaaatgaccgaccaagcgacgcccaacctgccatcacgagatttcgattccaccgccgccttctatgaaaggttgggcttcggaatcgttttccgggacgccggctggatgatcctccagcgcggggatctcatgctggagttcttcgcccaccccaacttgtttattgcagcttataatggttacaaataaagcaatagcatcacaaatttcacaaataaagcatttttttcactgcattctagttgtggtttgtccaaactcatcaatgtatcttatcatgtctgtataccgtcgacctctagctagagcttggcgtaatcatggtcatagctgtttcctgtgtgaaattgttatccgctcacaattccacacaacatacgagccggaagcataaagtgtaaagcctggggtgcctaatgagtgagctaactcacattaattgcgttgcgctcactgcccgctttccagtcgggaaacctgtcgtgccagctgcattaatgaatcggccaacgcgcggggagaggcggtttgcgtattgggcgctcttccgcttcctcgctcactgactcgctgcgctcggtcgttcggctgcggcgagcggtatcagctcactcaaaggcggtaatacggttatccacagaatcaggggataacgcaggaaagaacatgtgagcaaaaggccagcaaaaggccaggaaccgtaaaaaggccgcgttgctggcgtttttccataggctccgcccccctgacgagcatcacaaaaatcgacgctcaagtcagaggtggcgaaacccgacaggactataaagataccaggcgtttccccctggaagctccctcgtgcgctctcctgttccgaccctgccgcttaccggatacctgtccgcctttctcccttcgggaagcgtggcgctttctcatagctcacgctgtaggtatctcagttcggtgtaggtcgttcgctccaagctgggctgtgtgcacgaaccccccgttcagcccgaccgctgcgccttatccggtaactatcgtcttgagtccaacccggtaagacacgacttatcgccactggcagcagccactggtaacaggattagcagagcgaggtatgtaggcggtgctacagagttcttgaagtggtggcctaactacggctacactagaagaacagtatttggtatctgcgctctgctgaagccagttaccttcggaaaaagagttggtagctcttgatccggcaaacaaaccaccgctggtagcggtttttttgtttgcaagcagcagattacgcgcagaaaaaaaggatctcaagaagatcctttgatcttttctacggggtctgacgctcagtggaacgaaaactcacgttaagggattttggtcatgagattatcaaaaaggatcttcacctagatccttttaaattaaaaatgaagttttaaatcaatctaaagtatatatgagtaaacttggtctgacagttaccaatgcttaatcagtgaggcacctatctcagcgatctgtctatttcgttcatccatagttgcctgactccccgtcgtgtagataactacgatacgggagggcttaccatctggccccagtgctgcaatgataccgcgagacccacgctcaccggctccagatttatcagcaataaaccagccagccggaagggccgagcgcagaagtggtcctgcaactttatccgcctccatccagtctattaattgttgccgggaagctagagtaagtagttcgccagttaatagtttgcgcaacgttgttgccattgctacaggcatcgtggtgtcacgctcgtcgtttggtatggcttcattcagctccggttcccaacgatcaaggcgagttacatgatcccccatgttgtgcaaaaaagcggttagctccttcggtcctccgatcgttgtcagaagtaagttggccgcagtgttatcactcatggttatggcagcactgcataattctcttactgtcatgccatccgtaagatgcttttctgtgactggtgagtactcaaccaagtcattctgagaatagtgtatgcggcgaccgagttgctcttgcccggcgtcaatacgggataataccgcgccacatagcagaactttaaaagtgctcatcattggaaaacgttcttcggggcgaaaactctcaaggatcttaccgctgttgagatccagttcgatgtaacccactcgtgcacccaactgatcttcagcatcttttactttcaccagcgtttctgggtgagcaaaaacaggaaggcaaaatgccgcaaaaaagggaataagggcgacacggaaatgttgaatactcatactcttcctttttcaatattattgaagcatttatcagggttattgtctcatgagcggatacatatttgaatgtatttagaaaaataaacaaataggggttccgcgcacatttccccgaaaagtgccacctgacgtcgacggatcgggagatctcccgatcccctatggtgcactctcagtacaatctgctctgatgccgcatagttaagccagtatctgctccctgcttgtgtgttggaggtcgctgagtagtgcgcgagcaaaatttaagctacaacaaggcaaggcttgaccgacaattgcatgaagaatctgcttagggttaggcgttttgcgctgcttcgcgatgtacgggccagatatacgcgttgacattgattattgactagttattaatagtaatcaattacggggtcattagttcatagcccatatatggagttccgcgttacataacttacggtaaatggcccgcctggctgaccgcccaacgacccccgcccattgacgtcaataatgacgtatgttcccatagtaacgccaatagggactttccattgacgtcaatgggtggagtatttacggtaaactgcccacttggcagtacatcaagtgtatcatatgccaagtacgccccctattgacgtcaatgacggtaaatggcccgcctggcattatgcccagtacatgaccttatgggactttcctacttggcagtacatctacgtattagtcatcgctattaccatggtgatgcggttttggcagtacatcaatgggcgtggatagcggtttgactcacggggatttccaagtctccaccccattgacgtcaatgggagtttgttttggcaccaaaatcaacgggactttccaaaatgtcgtaacaactccgccccattgacgcaaatgggcggtaggcgtgtacggtgggaggtctatataagcagagctctctggctaactagagaacccactgcttactggcttatcgaaattaatacgactcactatagggagacccaagctggctagcgtttaaacttaagcttggtaccgagctcggatccgccaccatgaaactggacaacaacaatcacagcgtgttcctgctgtactaccacctggtgctggtcgtgaagtatcggagacaggtgatcgacgatacaatctctgattacgccaaggatatgttcgtgcggctgggcaagaactacaacatcagcctggtggaatggaaccacgacatggaccacgtgcacatcctgtttaaggcccatcctaatagcgagctgagcaagttcatcaacgcctacaagtccgccagcagcagactgatcaagaagcacttcccccaggttaagcggaagctgtggaaggaatacttttggagccggagcttctgcctgctcaccaccggcggcgctcctatcgaggtgattaagaaatacatcgagaaccagggaatgaaaggcagcggctccggaaaacggacagccgacggaagcgagttcgagtcaccgaaaaagaagcgaaaagtttaatctagagggcccgtttaaacccgctgatcagcctcgactgtgccttctagttgccagccatctgttgtttgcccctcccccgtgccttccttgaccctggaaggtgccactcccactgtcctttcctaataaaatgaggaaattgcatcgcattgtctgagtaggtgtcattctattctggggggtggggtggggcaggacagcaagggggaggattgggaagacaatagcaggcatgctggggatgcggtgggctctatggcttctgaggcggaaagaaccagctggggctctagggggtatccccacgcgccctgtagcggcgcattaagcgcggcgggtgtggtggttacgcgcagcgtgaccgctacacttgccagcgccctagcgcccgctcctttcgctttcttcccttcctttctcgccacgttcgccggctttccccgtcaagctctaaatcgggggctccctttagggttccgatttagtgctttacggcacctcgaccccaaaaaacttgattagggtgatggttcacgtagtgggccatcgccctgatagacggtttttcgccctttgacgttggagtccacgttctttaatagtggactcttgttccaaactggaacaacactcaaccctatctcggtctattcttttgatttataagggattttgccgatttcggcctattggttaaaaaatgagctgatttaacaaaaatttaacgcgaattaattctgtggaatgtgtgtcagttagggtgtggaaagtccccaggctccccagcaggcagaagtatgcaaagcatgcatctcaattagtca

SEQ ID NO: 90 - DNA, 4204 bp, synthetic construct
  source 1..4204: mol_type = other DNA
ctcatgagcggatacatatttgaatgtatttagaaaaataaacaaataggggttccgcgcacatttccccgaaaagtgccacctgatgcggtgtgaaataccgcacagatgcgtaaggagaaaataccgcatcaggaaattgtaagcgttaataattcagaagaactcgtcaagaaggcgatagaaggcgatgcgctgcgaatcgggagcggcgataccgtaaagcacgaggaagcggtcagcccattcgccgccaagctcttcagcaatatcacgggtagccaacgctatgtcctgatagcggtccgccacacccagccggccacagtcgatgaatccagaaaagcggccattttccaccatgatattcggcaagcaggcatcgccatgggtcacgacgagatcctcgccgtcgggcatgctcgccttgagcctggcgaacagttcggctggcgcgagcccctgatgctcttcgtccagatcatcctgatcgacaagaccggcttccatccgagtacgtgctcgctcgatgcgatgtttcgcttggtggtcgaatgggcaggtagccggatcaagcgtatgcagccgccgcattgcatcagccatgatggatactttctcggcaggagcaaggtgagatgacaggagatcctgccccggcacttcgcccaatagcagccagtcccttcccgcttcagtgacaacgtcgagcacagctgcgcaaggaacgcccgtcgtggccagccacgatagccgcgctgcctcgtcttgcagttcattcagggcaccggacaggtcggtcttgacaaaaagaaccgggcgcccctgcgctgacagccggaacacggcggcatcagagcagccgattgtctgttgtgcccagtcatagccgaatagcctctccacccaagcggccggagaacctgcgtgcaatccatcttgttcaatcatgcgaaacgatcctcatcctgtctcttgatcagagcttgatcccctgcgccatcagatccttggcggcaagaaagccatccagtttactttgcagggcttcccaaccttaccagagggcgccccagctggcaattccggttcgcttgctgtccataaaaccgcccagtctagctatcgccatgtaagcccactgcaagctacctgctttctctttgcgcttgcgttttcccttgtccagatagcccagtagctgacattcatccggggtcagcaccgtttctgcggactggctttctacgtgaaaaggatctaggtgaagatcctttttgataatctcatgcctgacatttatattccccagaacatcaggttaatggcgtttttgatgtcattttcgcggtggctgagatcagccacttcttccccgataacggagaccggcacactggccatatcggtggtcatcatgcgccagctttcatccccgatatgcaccaccgggtaaagttcacgggagactttatctgacagcagacgtgcactggccagggggatcaccatccgtcgccccggcgtgtcaataatatcactctgtacatccacaaacagacgataacggctctctcttttataggtgtaaaccttaaactgccgtacgtataggctgcgcaactgttgggaagggcgatcggtgcgggcctcttcgctattacgccagctggcgaaagggggatgtgctgcaaggcgattaagttgggtaacgccagggttttcccagtcacgacgttgtaaaacgacggccagtgaattgtaatacgactcactatagggcgaattgggccctctagatgcatgctcgagcggccgccagtgtgatggatatctgcagaattcgccctttgtacaaaaaagcaggctttaaaggaaccaattcagtcgactggatccggtaccaaggtcgggcaggaagagggcctatttcccatgattccttcatatttgcatatacgatacaaggctgttagagagataattagaattaatttgactgtaaacacaaagatattagtacaaaatacgtgacgtagaaagtaataatttcttgggtagtttgcagttttaaaattatgttttaaaatggactatcatatgcttaccgtaacttgaaagtatttcgatttcttggctttatatatcttgtggaaaggacgaaacaccggatgtcacaagccctccatttcggtcaaggcgttcatgacaacggctggggcatgttcaccactttccttcagtacaagctggccgaacaggggaagaagctgatcaaaatcgacaaatggttcccctcgtccaaaacgtgttcgtgctgcggtcgagtcaaggagtctctatcgctttctgaacggacattccgctgtgaatgtggattcgagagcgacagggacgtcaatgcggccatcaatatcaaacatgagggcatgaaacgattggcgatcgtctaatttgtcctcgaaccgtggggcacacggggatcgctcggtcaacttcccatcatgagatgggattacccgagaagcccccacctctaagcgaagcgtaggtggtgggagtatgtcactaagcatggtatagtgtttttttaagcttgatgcatagcttgagtattctatagtgtcacctaaatagcttggcgtaatcatggtcatagctgtttcctgtgtgaaattgttatccgctcacaattccacacaacatacgagccggaagcataaagtgtaaagcctggggtgcctaatgagtgagctaactcacattaattgcgttgcgctcactgcccgctttccagtcgggaaacctgtcgtgccagctgcattaatgaatcggccaacgcgcggggagaggcggtttgcgtattgggcgctcttccgcttcctcgctcactgactcgctgcgctcggtcgttcggctgcggcgagcggtatcagctcactcaaaggcggtaatacggttatccacagaatcaggggataacgcaggaaagaacatgtgagcaaaaggccagcaaaaggccaggaaccgtaaaaaggccgcgttgctggcgtttttccataggctccgcccccctgacgagcatcacaaaaatcgacgctcaagtcagaggtggcgaaacccgacaggactataaagataccaggcgtttccccctggaagctccctcgtgcgctctcctgttccgaccctgccgcttaccggatacctgtccgcctttctcccttcgggaagcgtggcgctttctcatagctcacgctgtaggtatctcagttcggtgtaggtcgttcgctccaagctgggctgtgtgcacgaaccccccgttcagcccgaccgctgcgccttatccggtaactatcgtcttgagtccaacccggtaagacacgacttatcgccactggcagcagccactggtaacaggattagcagagcgaggtatgtaggcggtgctacagagttcttgaagtggtggcctaactacggctacactagaagaacagtatttggtatctgcgctctgctgaagccagttaccttcggaaaaagagttggtagctcttgatccggcaaacaaaccaccgctggtagcggtggtttttttgtttgcaagcagcagattacgcgcagaaaaaaaggatctcaagaagatcctttgatcttttctacggggtctgacgctcagtggaacgaaaactcacgttaagggattttggtcatgagattatcaaaaaggatcttcacctagatccttttaaattaaaaatgaagttttagcacgtgtcagtcctgctcctcggccacgaagtgcacgcagttgccggccgggtcgcgcagggcgaactcccgcccccacggctgctcgccgatctcggtcatggccggcccggaggcgtcccggaagttcgtggacacgacctccgaccactcggcgtacagctcgtccaggccgcgcacccacacccaggccagggtgttgtccggcaccacctggtcctggaccgcgctgatgaacagggtcacgtcgtcccggaccacaccggcgaagtcgtcctccacgaagtcccgggagaacccgagccggtcggtccagaactcgaccgctccggcgacgtcgcgcgcggtgagcaccggaacggcactggtcaacttggccatggtggccctcctcacgtgctattattgaagcatttatcagggttattgt

SEQ ID NO: 91 - DNA, 4028 bp, synthetic construct
  source 1..4028: mol_type = other DNA
ctcatgagcggatacatatttgaatgtatttagaaaaataaacaaataggggttccgcgcacatttccccgaaaagtgccacctgatgcggtgtgaaataccgcacagatgcgtaaggagaaaataccgcatcaggaaattgtaagcgttaataattcagaagaactcgtcaagaaggcgatagaaggcgatgcgctgcgaatcgggagcggcgataccgtaaagcacgaggaagcggtcagcccattcgccgccaagctcttcagcaatatcacgggtagccaacgctatgtcctgatagcggtccgccacacccagccggccacagtcgatgaatccagaaaagcggccattttccaccatgatattcggcaagcaggcatcgccatgggtcacgacgagatcctcgccgtcgggcatgctcgccttgagcctggcgaacagttcggctggcgcgagcccctgatgctcttcgtccagatcatcctgatcgacaagaccggcttccatccgagtacgtgctcgctcgatgcgatgtttcgcttggtggtcgaatgggcaggtagccggatcaagcgtatgcagccgccgcattgcatcagccatgatggatactttctcggcaggagcaaggtgagatgacaggagatcctgccccggcacttcgcccaatagcagccagtcccttcccgcttcagtgacaacgtcgagcacagctgcgcaaggaacgcccgtcgtggccagccacgatagccgcgctgcctcgtcttgcagttcattcagggcaccggacaggtcggtcttgacaaaaagaaccgggcgcccctgcgctgacagccggaacacggcggcatcagagcagccgattgtctgttgtgcccagtcatagccgaatagcctctccacccaagcggccggagaacctgcgtgcaatccatcttgttcaatcatgcgaaacgatcctcatcctgtctcttgatcagagcttgatcccctgcgccatcagatccttggcggcaagaaagccatccagtttactttgcagggcttcccaaccttaccagagggcgccccagctggcaattccggttcgcttgctgtccataaaaccgcccagtctagctatcgccatgtaagcccactgcaagctacctgctttctctttgcgcttgcgttttcccttgtccagatagcccagtagctgacattcatccggggtcagcaccgtttctgcggactggctttctacgtgaaaaggatctaggtgaagatcctttttgataatctcatgcctgacatttatattccccagaacatcaggttaatggcgtttttgatgtcattttcgcggtggctgagatcagccacttcttccccgataacggagaccggcacactggccatatcggtggtcatcatgcgccagctttcatccccgatatgcaccaccgggtaaagttcacgggagactttatctgacagcagacgtgcactggccagggggatcaccatccgtcgccccggcgtgtcaataatatcactctgtacatccacaaacagacgataacggctctctcttttataggtgtaaaccttaaactgccgtacgtataggctgcgcaactgttgggaagggcgatcggtgcgggcctcttcgctattacgccagctggcgaaagggggatgtgctgcaaggcgattaagttgggtaacgccagggttttcccagtcacgacgttgtaaaacgacggccagtgaattgtaatacgactcactatagggcgaattgggccctctagatgcatgctcgagcggccgccagtgtgatggatatctgcagaattcgccctttgtacaaaaaagcaggctttaaaggaaccaattcagtcgactggatccggtaccaaggtcgggcaggaagagggcctatttcccatgattccttcatatttgcatatacgatacaaggctgttagagagataattagaattaatttgactgtaaacacaaagatattagtacaaaatacgtgacgtagaaagtaataatttcttgggtagtttgcagttttaaaattatgttttaaaatggactatcatatgcttaccgtaacttgaaagtatttcgatttcttggctttatatatcttgtggaaaggacgaaacaccgttaagcgcggcttgtatcgaacaaagtctggcaaactaattaatgctgatgtcaatggcgcattaaacatcttaaagaaaagtaaagctgtagacctgagtgtcttatgctctagcggcgaagtggacacgcctcaaagaataaggattgcttgaagcagtcaaacttctttggaagcccccacttcaaattttcgctagaaaattaagtgggggtagttcaccaattacaacttgacgtttttttaagcttgatgcatagcttgagtattctatagtgtcacctaaatagcttggcgtaatcatggtcatagctgtttcctgtgtgaaattgttatccgctcacaattccacacaacatacgagccggaagcataaagtgtaaagcctggggtgcctaatgagtgagctaactcacattaattgcgttgcgctcactgcccgctttccagtcgggaaacctgtcgtgccagctgcattaatgaatcggccaacgcgcggggagaggcggtttgcgtattgggcgctcttccgcttcctcgctcactgactcgctgcgctcggtcgttcggctgcggcgagcggtatcagctcactcaaaggcggtaatacggttatccacagaatcaggggataacgcaggaaagaacatgtgagcaaaaggccagcaaaaggccaggaaccgtaaaaaggccgcgttgctggcgtttttccataggctccgcccccctgacgagcatcacaaaaatcgacgctcaagtcagaggtggcgaaacccgacaggactataaagataccaggcgtttccccctggaagctccctcgtgcgctctcctgttccgaccctgccgcttaccggatacctgtccgcctttctcccttcgggaagcgtggcgctttctcatagctcacgctgtaggtatctcagttcggtgtaggtcgttcgctccaagctgggctgtgtgcacgaaccccccgttcagcccgaccgctgcgccttatccggtaactatcgtcttgagtccaacccggtaagacacgacttatcgccactggcagcagccactggtaacaggattagcagagcgaggtatgtaggcggtgctacagagttcttgaagtggtggcctaactacggctacactagaagaacagtatttggtatctgcgctctgctgaagccagttaccttcggaaaaagagttggtagctcttgatccggcaaacaaaccaccgctggtagcggtggtttttttgtttgcaagcagcagattacgcgcagaaaaaaaggatctcaagaagatcctttgatcttttctacggggtctgacgctcagtggaacgaaaactcacgttaagggattttggtcatgagattatcaaaaaggatcttcacctagatccttttaaattaaaaatgaagttttagcacgtgtcagtcctgctcctcggccacgaagtgcacgcagttgccggccgggtcgcgcagggcgaactcccgcccccacggctgctcgccgatctcggtcatggccggcccggaggcgtcccggaagttcgtggacacgacctccgaccactcggcgtacagctcgtccaggccgcgcacccacacccaggccagggtgttgtccggcaccacctggtcctggaccgcgctgatgaacagggtcacgtcgtcccggaccacaccggcgaagtcgtcctccacgaagtcccgggagaacccgagccggtcggtccagaactcgaccgctccggcgacgtcgcgcgcggtgagcaccggaacggcactggtcaacttggccatggtggccctcctcacgtgctattattgaagcatttatcagggttattgt

SEQ ID NO: 92 - DNA, 4025 bp, synthetic construct
  source 1..4025: mol_type = other DNA
ctcatgagcggatacatatttgaatgtatttagaaaaataaacaaataggggttccgcgcacatttccccgaaaagtgccacctgatgcggtgtgaaataccgcacagatgcgtaaggagaaaataccgcatcaggaaattgtaagcgttaataattcagaagaactcgtcaagaaggcgatagaaggcgatgcgctgcgaatcgggagcggcgataccgtaaagcacgaggaagcggtcagcccattcgccgccaagctcttcagcaatatcacgggtagccaacgctatgtcctgatagcggtccgccacacccagccggccacagtcgatgaatccagaaaagcggccattttccaccatgatattcggcaagcaggcatcgccatgggtcacgacgagatcctcgccgtcgggcatgctcgccttgagcctggcgaacagttcggctggcgcgagcccctgatgctcttcgtccagatcatcctgatcgacaagaccggcttccatccgagtacgtgctcgctcgatgcgatgtttcgcttggtggtcgaatgggcaggtagccggatcaagcgtatgcagccgccgcattgcatcagccatgatggatactttctcggcaggagcaaggtgagatgacaggagatcctgccccggcacttcgcccaatagcagccagtcccttcccgcttcagtgacaacgtcgagcacagctgcgcaaggaacgcccgtcgtggccagccacgatagccgcgctgcctcgtcttgcagttcattcagggcaccggacaggtcggtcttgacaaaaagaaccgggcgcccctgcgctgacagccggaacacggcggcatcagagcagccgattgtctgttgtgcccagtcatagccgaatagcctctccacccaagcggccggagaacctgcgtgcaatccatcttgttcaatcatgcgaaacgatcctcatcctgtctcttgatcagagcttgatcccctgcgccatcagatccttggcggcaagaaagccatccagtttactttgcagggcttcccaaccttaccagagggcgccccagctggcaattccggttcgcttgctgtccataaaaccgcccagtctagctatcgccatgtaagcccactgcaagctacctgctttctctttgcgcttgcgttttcccttgtccagatagcccagtagctgacattcatccggggtcagcaccgtttctgcggactggctttctacgtgaaaaggatctaggtgaagatcctttttgataatctcatgcctgacatttatattccccagaacatcaggttaatggcgtttttgatgtcattttcgcggtggctgagatcagccacttcttccccgataacggagaccggcacactggccatatcggtggtcatcatgcgccagctttcatccccgatatgcaccaccgggtaaagttcacgggagactttatctgacagcagacgtgcactggccagggggatcaccatccgtcgccccggcgtgtcaataatatcactctgtacatccacaaacagacgataacggctctctcttttataggtgtaaaccttaaactgccgtacgtataggctgcgcaactgttgggaagggcgatcggtgcgggcctcttcgctattacgccagctggcgaaagggggatgtgctgcaaggcgattaagttgggtaacgccagggttttcccagtcacgacgttgtaaaacgacggccagtgaattgtaatacgactcactatagggcgaattgggccctctagatgcatgctcgagcggccgccagtgtgatggatatctgcagaattcgccctttgtacaaaaaagcaggctttaaaggaaccaattcagtcgactggatccggtaccaaggtcgggcaggaagagggcctatttcccatgattccttcatatttgcatatacgatacaaggctgttagagagataattagaattaatttgactgtaaacacaaagatattagtacaaaatacgtgacgtagaaagtaataatttcttgggtagtttgcagttttaaaattatgttttaaaatggactatcatatgcttaccgtaacttgaaagtatttcgatttcttggctttatatatcttgtggaaaggacgaaacaccgtttacggtcaaaccgtttacgtatcgacggattgcttaggtatgaagtcgtagatggcgagttcccgcccttgagtatcatggatactcatgttgcctgtggctcccaacgggacgggtgccaggtgttgcctgcagataggctgccaaccagcctatcatgcatccacctccgaaggggaaacaggaaacccccacttcgataagtgggggaggttcattaagcatggtatagtgtttttttaagcttgatgcatagcttgagtattctatagtgtcacctaaatagcttggcgtaatcatggtcatagctgtttcctgtgtgaaattgttatccgctcacaattccacacaacatacgagccggaagcataaagtgtaaagcctggggtgcctaatgagtgagctaactcacattaattgcgttgcgctcactgcccgctttccagtcgggaaacctgtcgtgccagctgcattaatgaatcggccaacgcgcggggagaggcggtttgcgtattgggcgctcttccgcttcctcgctcactgactcgctgcgctcggtcgttcggctgcggcgagcggtatcagctcactcaaaggcggtaatacggttatccacagaatcaggggataacgcaggaaagaacatgtgagcaaaaggccagcaaaaggccaggaaccgtaaaaaggccgcgttgctggcgtttttccataggctccgcccccctgacgagcatcacaaaaatcgacgctcaagtcagaggtggcgaaacccgacaggactataaagataccaggcgtttccccctggaagctccctcgtgcgctctcctgttccgaccctgccgcttaccggatacctgtccgcctttctcccttcgggaagcgtggcgctttctcatagctcacgctgtaggtatctcagttcggtgtaggtcgttcgctccaagctgggctgtgtgcacgaaccccccgttcagcccgaccgctgcgccttatccggtaactatcgtcttgagtccaacccggtaagacacgacttatcgccactggcagcagccactggtaacaggattagcagagcgaggtatgtaggcggtgctacagagttcttgaagtggtggcctaactacggctacactagaagaacagtatttggtatctgcgctctgctgaagccagttaccttcggaaaaagagttggtagctcttgatccggcaaacaaaccaccgctggtagcggtggtttttttgtttgcaagcagcagattacgcgcagaaaaaaaggatctcaagaagatcctttgatcttttctacggggtctgacgctcagtggaacgaaaactcacgttaagggattttggtcatgagattatcaaaaaggatcttcacctagatccttttaaattaaaaatgaagttttagcacgtgtcagtcctgctcctcggccacgaagtgcacgcagttgccggccgggtcgcgcagggcgaactcccgcccccacggctgctcgccgatctcggtcatggccggcccggaggcgtcccggaagttcgtggacacgacctccgaccactcggcgtacagctcgtccaggccgcgcacccacacccaggccagggtgttgtccggcaccacctggtcctggaccgcgctgatgaacagggtcacgtcgtcccggaccacaccggcgaagtcgtcctccacgaagtcccgggagaacccgagccggtcggtccagaactcgaccgctccggcgacgtcgcgcgcggtgagcaccggaacggcactggtcaacttggccatggtggccctcctcacgtgctattattgaagcatttatcagggttattgt

SEQ ID NO: 93 - DNA, 4025 bp, synthetic construct
  source 1..4025: mol_type = other DNA
ctcatgagcggatacatatttgaatgtatttagaaaaataaacaaataggggttccgcgcacatttccccgaaaagtgccacctgatgcggtgtgaaataccgcacagatgcgtaaggagaaaataccgcatcaggaaattgtaagcgttaataattcagaagaactcgtcaagaaggcgatagaaggcgatgcgctgcgaatcgggagcggcgataccgtaaagcacgaggaagcggtcagcccattcgccgccaagctcttcagcaatatcacgggtagccaacgctatgtcctgatagcggtccgccacacccagccggccacagtcgatgaatccagaaaagcggccattttccaccatgatattcggcaagcaggcatcgccatgggtcacgacgagatcctcgccgtcgggcatgctcgccttgagcctggcgaacagttcggctggcgcgagcccctgatgctcttcgtccagatcatcctgatcgacaagaccggcttccatccgagtacgtgctcgctcgatgcgatgtttcgcttggtggtcgaatgggcaggtagccggatcaagcgtatgcagccgccgcattgcatcagccatgatggatactttctcggcaggagcaaggtgagatgacaggagatcctgccccggcacttcgcccaatagcagccagtcccttcccgcttcagtgacaacgtcgagcacagctgcgcaaggaacgcccgtcgtggccagccacgatagccgcgctgcctcgtcttgcagttcattcagggcaccggacaggtcggtcttgacaaaaagaaccgggcgcccctgcgctgacagccggaacacggcggcatcagagcagccgattgtctgttgtgcccagtcatagccgaatagcctctccacccaagcggccggagaacctgcgtgcaatccatcttgttcaatcatgcgaaacgatcctcatcctgtctcttgatcagagcttgatcccctgcgccatcagatccttggcggcaagaaagccatccagtttactttgcagggcttcccaaccttaccagagggcgccccagctggcaattccggttcgcttgctgtccataaaaccgcccagtctagctatcgccatgtaagcccactgcaagctacctgctttctctttgcgcttgcgttttcccttgtccagatagcccagtagctgacattcatccggggtcagcaccgtttctgcggactggctttctacgtgaaaaggatctaggtgaagatcctttttgataatctcatgcctgacatttatattccccagaacatcaggttaatggcgtttttgatgtcattttcgcggtggctgagatcagccacttcttccccgataacggagaccggcacactggccatatcggtggtcatcatgcgccagctttcatccccgatatgcaccaccgggtaaagttcacgggagactttatctgacagcagacgtgcactggccagggggatcaccatccgtcgccccggcgtgtcaataatatcactctgtacatccacaaacagacgataacggctctctcttttataggtgtaaaccttaaactgccgtacgtataggctgcgcaactgttgggaagggcgatcggtgcgggcctcttcgctattacgccagctggcgaaagggggatgtgctgcaaggcgattaagttgggtaacgccagggttttcccagtcacgacgttgtaaaacgacggccagtgaattgtaatacgactcactatagggcgaattgggccctctagatgcatgctcgagcggccgccagtgtgatggatatctgcagaattcgccctttgtacaaaaaagcaggctttaaaggaaccaattcagtcgactggatccggtaccaaggtcgggcaggaagagggcctatttcccatgattccttcatatttgcatatacgatacaaggctgttagagagataattagaattaatttgactgtaaacacaaagatattagtacaaaatacgtgacgtagaaagtaataatttcttgggtagtttgcagttttaaaattatgttttaaaatggactatcatatgcttaccgtaacttgaaagtatttcgatttcttggctttatatatcttgtggaaaggacgaaacaccgtatacctcaaacgatgaccgcattggtgctatgaaccttcaacgaaaaggaatagagtacatcgttgaaggaacgacacaggcatgacctgcgtcgttgggtagttgtcaacctgccccctgatgcaaccccaagtcaaggaaggaggacgaagtccgctcgcacttctggggagttgcaagcccccacttcaagcgttagctaagtgggggtagttgacgcaggtgctgaaagcctttttttaagcttgatgcatagcttgagtattctatagtgtcacctaaatagcttggcgtaatcatggtcatagctgtttcctgtgtgaaattgttatccgctcacaattccacacaacatacgagccggaagcataaagtgtaaagcctggggtgcctaatgagtgagctaactcacattaattgcgttgcgctcactgcccgctttccagtcgggaaacctgtcgtgccagctgcattaatgaatcggccaacgcgcggggagaggcggtttgcgtattgggcgctcttccgcttcctcgctcactgactcgctgcgctcggtcgttcggctgcggcgagcggtatcagctcactcaaaggcggtaatacggttatccacagaatcaggggataacgcaggaaagaacatgtgagcaaaaggccagcaaaaggccaggaaccgtaaaaaggccgcgttgctggcgtttttccataggctccgcccccctgacgagcatcacaaaaatcgacgctcaagtcagaggtggcgaaacccgacaggactataaagataccaggcgtttccccctggaagctccctcgtgcgctctcctgttccgaccctgccgcttaccggatacctgtccgcctttctcccttcgggaagcgtggcgctttctcatagctcacgctgtaggtatctcagttcggtgtaggtcgttcgctccaagctgggctgtgtgcacgaaccccccgttcagcccgaccgctgcgccttatccggtaactatcgtcttgagtccaacccggtaagacacgacttatcgccactggcagcagccactggtaacaggattagcagagcgaggtatgtaggcggtgctacagagttcttgaagtggtggcctaactacggctacactagaagaacagtatttggtatctgcgctctgctgaagccagttaccttcggaaaaagagttggtagctcttgatccggcaaacaaaccaccgctggtagcggtggtttttttgtttgcaagcagcagattacgcgcagaaaaaaaggatctcaagaagatcctttgatcttttctacggggtctgacgctcagtggaacgaaaactcacgttaagggattttggtcatgagattatcaaaaaggatcttcacctagatccttttaaattaaaaatgaagttttagcacgtgtcagtcctgctcctcggccacgaagtgcacgcagttgccggccgggtcgcgcagggcgaactcccgcccccacggctgctcgccgatctcggtcatggccggcccggaggcgtcccggaagttcgtggacacgacctccgaccactcggcgtacagctcgtccaggccgcgcacccacacccaggccagggtgttgtccggcaccacctggtcctggaccgcgctgatgaacagggtcacgtcgtcccggaccacaccggcgaagtcgtcctccacgaagtcccgggagaacccgagccggtcggtccagaactcgaccgctccggcgacgtcgcgcgcggtgagcaccggaacggcactggtcaacttggccatggtggccctcctcacgtgctattattgaagcatttatcagggttattgt

SEQ ID NO: 94 - DNA, 4086 bp, synthetic construct
  source 1..4086: mol_type = other DNA
ctcatgagcggatacatatttgaatgtatttagaaaaataaacaaataggggttccgcgcacatttccccgaaaagtgccacctgatgcggtgtgaaataccgcacagatgcgtaaggagaaaataccgcatcaggaaattgtaagcgttaataattcagaagaactcgtcaagaaggcgatagaaggcgatgcgctgcgaatcgggagcggcgataccgtaaagcacgaggaagcggtcagcccattcgccgccaagctcttcagcaatatcacgggtagccaacgctatgtcctgatagcggtccgccacacccagccggccacagtcgatgaatccagaaaagcggccattttccaccatgatattcggcaagcaggcatcgccatgggtcacgacgagatcctcgccgtcgggcatgctcgccttgagcctggcgaacagttcggctggcgcgagcccctgatgctcttcgtccagatcatcctgatcgacaagaccggcttccatccgagtacgtgctcgctcgatgcgatgtttcgcttggtggtcgaatgggcaggtagccggatcaagcgtatgcagccgccgcattgcatcagccatgatggatactttctcggcaggagcaaggtgagatgacaggagatcctgccccggcacttcgcccaatagcagccagtcccttcccgcttcagtgacaacgtcgagcacagctgcgcaaggaacgcccgtcgtggccagccacgatagccgcgctgcctcgtcttgcagttcattcagggcaccggacaggtcggtcttgacaaaaagaaccgggcgcccctgcgctgacagccggaacacggcggcatcagagcagccgattgtctgttgtgcccagtcatagccgaatagcctctccacccaagcggccggagaacctgcgtgcaatccatcttgttcaatcatgcgaaacgatcctcatcctgtctcttgatcagagcttgatcccctgcgccatcagatccttggcggcaagaaagccatccagtttactttgcagggcttcccaaccttaccagagggcgccccagctggcaattccggttcgcttgctgtccataaaaccgcccagtctagctatcgccatgtaagcccactgcaagctacctgctttctctttgcgcttgcgttttcccttgtccagatagcccagtagctgacattcatccggggtcagcaccgtttctgcggactggctttctacgtgaaaaggatctaggtgaagatcctttttgataatctcatgcctgacatttatattccccagaacatcaggttaatggcgtttttgatgtcattttcgcggtggctgagatcagccacttcttccccgataacggagaccggcacactggccatatcggtggtcatcatgcgccagctttcatccccgatatgcaccaccgggtaaagttcacgggagactttatctgacagcagacgtgcactggccagggggatcaccatccgtcgccccggcgtgtcaataatatcactctgtacatccacaaacagacgataacggctctctcttttataggtgtaaaccttaaactgccgtacgtataggctgcgcaactgttgggaagggcgatcggtgcgggcctcttcgctattacgccagctggcgaaagggggatgtgctgcaaggcgattaagttgggtaacgccagggttttcccagtcacgacgttgtaaaacgacggccagtgaattgtaatacgactcactatagggcgaattgggccctctagatgcatgctcgagcggccgccagtgtgatggatatctgcagaattcgccctttgtacaaaaaagcaggctttaaaggaaccaattcagtcgactggatccggtaccaaggtcgggcaggaagagggcctatttcccatgattccttcatatttgcatatacgatacaaggctgttagagagataattagaattaatttgactgtaaacacaaagatattagtacaaaatacgtgacgtagaaagtaataatttcttgggtagtttgcagttttaaaattatgttttaaaatggactatcatatgcttaccgtaacttgaaagtatttcgatttcttggctttatatatcttgtggaaaggacgaaacaccggctttcagcacctgcgtcaactccccaccacttaaagcctaacggcttttgaagtgggggcttggcaagccctagttgactaccctcagccattcaatggctacgttggaagggtcatgacacttacggatgctcctccagtccgtaaccctgtcgcagatggttaaaagctctgatgggtaggagcggtgctgtctgccgaacaagcccttccaacattggggaggaggaactcactcctgaaaggaggtacacgtcttgttcgtgtacattatcaataagcatggaaaaccactctttttttaagcttgatgcatagcttgagtattctatagtgtcacctaaatagcttggcgtaatcatggtcatagctgtttcctgtgtgaaattgttatccgctcacaattccacacaacatacgagccggaagcataaagtgtaaagcctggggtgcctaatgagtgagctaactcacattaattgcgttgcgctcactgcccgctttccagtcgggaaacctgtcgtgccagctgcattaatgaatcggccaacgcgcggggagaggcggtttgcgtattgggcgctcttccgcttcctcgctcactgactcgctgcgctcggtcgttcggctgcggcgagcggtatcagctcactcaaaggcggtaatacggttatccacagaatcaggggataacgcaggaaagaacatgtgagcaaaaggccagcaaaaggccaggaaccgtaaaaaggccgcgttgctggcgtttttccataggctccgcccccctgacgagcatcacaaaaatcgacgctcaagtcagaggtggcgaaacccgacaggactataaagataccaggcgtttccccctggaagctccctcgtgcgctctcctgttccgaccctgccgcttaccggatacctgtccgcctttctcccttcgggaagcgtggcgctttctcatagctcacgctgtaggtatctcagttcggtgtaggtcgttcgctccaagctgggctgtgtgcacgaaccccccgttcagcccgaccgctgcgccttatccggtaactatcgtcttgagtccaacccggtaagacacgacttatcgccactggcagcagccactggtaacaggattagcagagcgaggtatgtaggcggtgctacagagttcttgaagtggtggcctaactacggctacactagaagaacagtatttggtatctgcgctctgctgaagccagttaccttcggaaaaagagttggtagctcttgatccggcaaacaaaccaccgctggtagcggtggtttttttgtttgcaagcagcagattacgcgcagaaaaaaaggatctcaagaagatcctttgatcttttctacggggtctgacgctcagtggaacgaaaactcacgttaagggattttggtcatgagattatcaaaaaggatcttcacctagatccttttaaattaaaaatgaagttttagcacgtgtcagtcctgctcctcggccacgaagtgcacgcagttgccggccgggtcgcgcagggcgaactcccgcccccacggctgctcgccgatctcggtcatggccggcccggaggcgtcccggaagttcgtggacacgacctccgaccactcggcgtacagctcgtccaggccgcgcacccacacccaggccagggtgttgtccggcaccacctggtcctggaccgcgctgatgaacagggtcacgtcgtcccggaccacaccggcgaagtcgtcctccacgaagtcccgggagaacccgagccggtcggtccagaactcgaccgctccggcgacgtcgcgcgcggtgagcaccggaacggcactggtcaacttggccatggtggccctcctcacgtgctattattgaagcatttatcagggttattgt

SEQ ID NO: 95 - DNA, 21 bp, synthetic construct
  source 1..21: mol_type = other DNA
tttaataagcatggtatagtg

SEQ ID NO: 96 - DNA, 21 bp, synthetic construct
  source 1..21: mol_type = other DNA
tttaattacatatttatcaat

SEQ ID NO: 97 - DNA, 21 bp, synthetic construct
  source 1..21: mol_type = other DNA
tttaagcaagggctgatgtgg

SEQ ID NO: 98 - DNA, 21 bp, synthetic construct
  source 1..21: mol_type = other DNA
tttaattaggtgggtggtcat

SEQ ID NO: 99 - DNA, 21 bp, synthetic construct
  source 1..21: mol_type = other DNA
tttaaccctccagtgtatcca

SEQ ID NO: 100 - DNA, 21 bp, synthetic construct
  source 1..21: mol_type = other DNA
tttatcaattacaacttgacg

SEQ ID NO: 101 - DNA, 21 bp, synthetic construct
  source 1..21: mol_type = other DNA
tttatcagttttggaggatgt

SEQ ID NO: 102 - DNA, 21 bp, synthetic construct
  source 1..21: mol_type = other DNA
tttatgtacatcctccaaaac

SEQ ID NO: 103 - DNA, 21 bp, synthetic construct
  source 1..21: mol_type = other DNA
tttattattattgtttgcaat

SEQ ID NO: 104 - DNA, 21 bp, synthetic construct
  source 1..21: mol_type = other DNA
ttcatgcaggtgctgaaagcc

SEQ ID NO: 105 - DNA, 21 bp, synthetic construct
  source 1..21: mol_type = other DNA
ttcatcctagcaacttctctg

SEQ ID NO: 106 - DNA, 21 bp, synthetic construct
  source 1..21: mol_type = other DNA
ttcattttccagctctagaag

SEQ ID NO: 107 - DNA, 21 bp, synthetic construct
  source 1..21: mol_type = other DNA
ttcatcaattagcccatcaca

SEQ ID NO: 108 - DNA, 21 bp, synthetic construct
  source 1..21: mol_type = other DNA
ttcattcaacaaatatttact

SEQ ID NO: 109 - DNA, 21 bp, synthetic construct
  source 1..21: mol_type = other DNA
ggctttcagcacctgcatgaa

SEQ ID NO: 110 - DNA, 21 bp, synthetic construct
  source 1..21: mol_type = other DNA
cttctagagctggaaaatgaa

SEQ ID NO: 111 - DNA, 23 bp, synthetic construct
  source 1..23: mol_type = other DNA
gccttctagagctggaaaatgaa

SEQ ID NO: 112 - DNA, 21 bp, synthetic construct
  source 1..21: mol_type = other DNA
tgtgatgggctaattgatgaa

SEQ ID NO: 113 - DNA, 21 bp, synthetic construct
  source 1..21: mol_type = other DNA
agtaaatatttgttgaatgaa

SEQ ID NO: 114 - DNA, 27 bp, synthetic construct
  source 1..27: mol_type = other DNA
gctcatagtaaatatttgttgaatgaa

SEQ ID NO: 115 - DNA, 3781 bp, synthetic construct
  source 1..3781: mol_type = other DNA
acgccactggcagcagccattggtaactgggagttcgcagaggatttgtttagctaaacacgcggttgctcttgaagtgtgcgccaaagtccggctacactggaaggacagatttggttgctgtgctctgcgaaagccagttaccacggttaagcagttccccaactgacttaaccttcgatcaaaccacctccccaggtggttttttcgtttacagggcaaaagattacgcgcagaaaaaaaggatctcaagaagatcctttgatcttttctactgaaccgctctagatttcagtgcaatttatctcttcaaatgtagcacctgaagtcagccccatacgatataagttgtaattctcatgttagtcatgccccgcgcccaccggaaggagctgactgggttgaaggctctcaagggcatcggtcgagatcccggtgcctaatgagtgagctaacttacattaattgcgttgcgctcactgcccgctttccagtcgggaaacctgtcgtgccagctgcattaatgaatcggccaacgcgcggggagaggcggtttgcgtattgggcgccagggtggtttttcttttcaccagtgagacgggcaacagctgattgcccttcaccgcctggccctgagagagttgcagcaagcggtccacgctggtttgccccagcaggcgaaaatcctgtttgatggtggttaacggcgggatataacatgagctgtcttcggtatcgtcgtatcccactaccgagatgtccgcaccaacgcgcagcccggactcggtaatggcgcgcattgcgcccagcgccatctgatcgttggcaaccagcatcgcagtgggaacgatgccctcattcagcatttgcatggtttgttgaaaaccggacatggcactccagtcgccttcccgttccgctatcggctgaatttgattgcgagtgagatatttatgccagccagccagacgcagacgcgccgagacagaacttaatgggcccgctaacagcgcgatttgctggtgacccaatgcgaccagatgctccacgcccagtcgcgtaccgtcttcatgggagaaaataatactgttgatgggtgtctggtcagagacatcaagaaataacgccggaacattagtgcaggcagcttccacagcaatggcatcctggtcatccagcggatagttaatgatcagcccactgacgcgttgcgcgagaagattgtgcaccgccgctttacaggcttcgacgccgcttcgttctaccatcgacaccaccacgctggcacccagttgatcggcgcgagatttaatcgccgcgacaatttgcgacggcgcgtgcagggccagactggaggtggcaacgccaatcagcaacgactgtttgcccgccagttgttgtgccacgcggttgggaatgtaattcagctccgccatcgccgcttccactttttcccgcgttttcgcagaaacgtggctggcctggttcaccacgcgggaaacggtctgataagagacaccggcatactctgcgacatcgtataacgttactggtttcacattcaccaccctgaattgactctcttccgggcgctatcatgccataccgcgaaaggttttgcgccattcgatggtgtccgggatctcgacgctctcccttatgcgactcctgcattaggaaattaatacgactcactataggggaattgtgagcggataacaattcccctgtagaaataattttgtttaactttaataaggagatataccatgggcagcagccatcaccatcatcaccacagccaggatccgaattcgagctcggcgcgcctgcaggtcgacaagcttgcggccgcataatgcttaagtcgaacagaaagtaatcgtattgtacacggccgcataatcgaaattaatacgactcactataggggaattgtgagcggataacaattccccatcttagtatattagttaagtataagaaggagatatacatatggcagatctcaattggatatcggccggccacgcgatcgctgacgtcggtaccctcgagtctggtaaagaaaccgctgctgcgaaatttgaacgccagcacatggactcgtctactagcgcagcttaattaacctaggctgctgccaccgctgagcaataactagcataaccccttggggcctctaaacgggtcttgaggggttttttgctgaaacctcaggcatttgagaagcacacggtcacactgcttccggtagtcaataaaccggtaaaccagcaatagacataagcggctatttaacgaccctgccctgaaccgacgaccgggtcatcgtggccggatcttgcggcccctcggcttgaacgaattgttagacattatttgccgactaccttggtgatctcgcctttcacgtagtggacaaattcttccaactgatctgcgcgcgaggccaagcgatcttcttcttgtccaagataagcctgtctagcttcaagtatgacgggctgatactgggccggcaggcgctccattgcccagtcggcagcgacatccttcggcgcgattttgccggttactgcgctgtaccaaatgcgggacaacgtaagcactacatttcgctcatcgccagcccagtcgggcggcgagttccatagcgttaaggtttcatttagcgcctcaaatagatcctgttcaggaaccggatcaaagagttcctccgccgctggacctaccaaggcaacgctatgttctcttgcttttgtcagcaagatagccagatcaatgtcgatcgtggctggctcgaagatacctgcaagaatgtcattgcgctgccattctccaaattgcagttcgcgcttagctggataacgccacggaatgatgtcgtcgtgcacaacaatggtgacttctacagcgcggagaatctcgctctctccaggggaagccgaagtttccaaaaggtcgttgatcaaagctcgccgcgttgtttcatcaagccttacggtcaccgtaaccagcaaatcaatatcactgtgtggcttcaggccgccatccactgcggagccgtacaaatgtacggccagcaacgtcggttcgagatggcgctcgatgacgccaactacctctgatagttgagtcgatacttcggcgatcaccgcttccctcatactcttcctttttcaatattattgaagcatttatcagggttattgtctcatgagcggatacatatttgaatgtatttagaaaaataaacaaatagctagctcactcggtcgctacgctccgggcgtgagactgcggcgggcgctgcggacacatacaaagttacccacagattccgtggataagcaggggactaacatgtgaggcaaaacagcagggccgcgccggtggcgtttttccataggctccgccctcctgccagagttcacataaacagacgcttttccggtgcatctgtgggagccgtgaggctcaaccatgaatctgacagtacgggcgaaacccgacaggacttaaagatccccaccgtttccggcgggtcgctccctcttgcgctctcctgttccgaccctgccgtttaccggatacctgttccgcctttctcccttacgggaagtgtggcgctttctcatagctcacacactggtatctcggctcggtgtaggtcgttcgctccaagctgggctgtaagcaagaactccccgttcagcccgactgctgcgccttatccggtaactgttcacttgagtccaacccggaaaagcacggtaaa

SEQ ID NO: 116 - DNA, 3719 bp, synthetic construct
  source 1..3719: mol_type = other DNA
cgggatctcgacgctctcccttatgcgactcctgcattaggaaattaatacgactcactataggggaattgtgagcggataacaattcccctgtagaaataattttgtttaactttaataaggagatataccatgggcagcagccatcaccatcatcaccacagccaggatccgaattcgagctcggcgcgcctgcaggtcgacaagcttgcggccgcataatgcttaagtcgaacagaaagtaatcgtattgtacacggccgcataatcgaaattaatacgactcactataggggaattgtgagcggataacaattccccatcttagtatattagttaagtataagaaggagatatacatatggcagatctcaattggatatcggccggccacgcgatcgctgacgtcggtaccctcgagtctggtaaagaaaccgctgctgcgaaatttgaacgccagcacatggactcgtctactagcgcagcttaattaacctaggctgctgccaccgctgagcaataactagcataaccccttggggcctctaaacgggtcttgaggggttttttgctgaaacctcaggcatttgagaagcacacggtcacactgcttccggtagtcaataaaccggtaaaccagcaatagacataagcggctatttaacgaccctgccctgaaccgacgacaagctgacgaccgggtctccgcaagtggcacttttcggggaaatgtgcgcggaacccctatttgtttatttttctaaatacattcaaatatgtatccgctcatgaattaattcttagaaaaactcatcgagcatcaaatgaaactgcaatttattcatatcaggattatcaataccatatttttgaaaaagccgtttctgtaatgaaggagaaaactcaccgaggcagttccataggatggcaagatcctggtatcggtctgcgattccgactcgtccaacatcaatacaacctattaatttcccctcgtcaaaaataaggttatcaagtgagaaatcaccatgagtgacgactgaatccggtgagaatggcaaaagtttatgcatttctttccagacttgttcaacaggccagccattacgctcgtcatcaaaatcactcgcatcaaccaaaccgttattcattcgtgattgcgcctgagcgagacgaaatacgcggtcgctgttaaaaggacaattacaaacaggaatcgaatgcaaccggcgcaggaacactgccagcgcatcaacaatattttcacctgaatcaggatattcttctaatacctggaatgctgttttcccggggatcgcagtggtgagtaaccatgcatcatcaggagtacggataaaatgcttgatggtcggaagaggcataaattccgtcagccagtttagtctgaccatctcatctgtaacatcattggcaacgctacctttgccatgtttcagaaacaactctggcgcatcgggcttcccatacaatcgatagattgtcgcacctgattgcccgacattatcgcgagcccatttatacccatataaatcagcatccatgttggaatttaatcgcggcctagagcaagacgtttcccgttgaatatggctcatactcttcctttttcaatattattgaagcatttatcagggttattgtctcatgagcggatacatatttgaatgtatttagaaaaataaacaaataggcatgctagcgcagaaacgtcctagaagatgccaggaggatacttagcagagagacaataaggccggagcgaagccgtttttccataggctccgcccccctgacgaacatcacgaaatctgacgctcaaatcagtggtggcgaaacccgacaggactataaagataccaggcgtttccccctgatggctccctcttgcgctctcctgttcccgtcctgcggcgtccgtgttgtggtggaggctttacccaaatcaccacgtcccgttccgtgtagacagttcgctccaagctgggctgtgtgcaagaaccccccgttcagcccgactgctgcgccttatccggtaactatcatcttgagtccaacccggaaagacacgacaaaacgccactggcagcagccattggtaactgagaattagtggatttagatatcgagagtcttgaagtggtggcctaacagaggctacactgaaaggacagtatttggtatctgcgctccactaaagccagttaccaggttaagcagttccccaactgacttaaccttcgatcaaaccgcctccccaggcggttttttcgtttacagagcaggagattacgacgatcgtaaaaggatctcaagaagatcctttacggattcccgacaccatcactctagatttcagtgcaatttatctcttcaaatgtagcacctgaagtcagccccatacgatataagttgtaattctcatgttagtcatgccccgcgcccaccggaaggagctgactgggttgaaggctctcaagggcatcggtcgagatcccggtgcctaatgagtgagctaacttacattaattgcgttgcgctcactgcccgctttccagtcgggaaacctgtcgtgccagctgcattaatgaatcggccaacgcgcggggagaggcggtttgcgtattgggcgccagggtggtttttcttttcaccagtgagacgggcaacagctgattgcccttcaccgcctggccctgagagagttgcagcaagcggtccacgctggtttgccccagcaggcgaaaatcctgtttgatggtggttaacggcgggatataacatgagctgtcttcggtatcgtcgtatcccactaccgagatgtccgcaccaacgcgcagcccggactcggtaatggcgcgcattgcgcccagcgccatctgatcgttggcaaccagcatcgcagtgggaacgatgccctcattcagcatttgcatggtttgttgaaaaccggacatggcactccagtcgccttcccgttccgctatcggctgaatttgattgcgagtgagatatttatgccagccagccagacgcagacgcgccgagacagaacttaatgggcccgctaacagcgcgatttgctggtgacccaatgcgaccagatgctccacgcccagtcgcgtaccgtcttcatgggagaaaataatactgttgatgggtgtctggtcagagacatcaagaaataacgccggaacattagtgcaggcagcttccacagcaatggcatcctggtcatccagcggatagttaatgatcagcccactgacgcgttgcgcgagaagattgtgcaccgccgctttacaggcttcgacgccgcttcgttctaccatcgacaccaccacgctggcacccagttgatcggcgcgagatttaatcgccgcgacaatttgcgacggcgcgtgcagggccagactggaggtggcaacgccaatcagcaacgactgtttgcccgccagttgttgtgccacgcggttgggaatgtaattcagctccgccatcgccgcttccactttttcccgcgttttcgcagaaacgtggctggcctggttcaccacgcgggaaacggtctgataagagacaccggcatactctgcgacatcgtataacgttactggtttcacattcaccaccctgaattgactctcttccgggcgctatcatgccataccgcgaaaggttttgcgccattcgatggtgtc

SEQ ID NO: 117 - DNA, 2710 bp, synthetic construct
  source 1..2710: mol_type = other DNA
tcgcgcgtttcggtgatgacggtgaaaacctctgacacatgcagctcccggagacggtcacagcttgtctgtaagcggatgccgggagcagacaagcccgtcagggcgcgtcagcgggtgttggcgggtgtcggggctggcttaactatgcggcatcagagcagattgtactgagagtgcaccatatgcggtgtgaaataccgcacagatgcgtaaggagaaaataccgcatcaggcgccattcgccattcaggctgcgcaactgttgggaagggcgatcggtgcgggcctcttcgctattacgccagctggcgaaagggggatgtgctgcaaggcgattaagttgggtaacgccagggttttcccagtcacgacgttgtaaaacgacggccagtgaattcgagctcggtacctcgcgaatgcatctagatatcggatcccgggcccgtcgactgcagaggcctgcatgcaagcttggcgtaatcatggtcatagctgtttcctgtgtgaaattgttatccgctcacaattccacacaacatacgagccggaagcataaagtgtaaagcctggggtgcctaatgagtgagctaactcacattaattgcgttgcgctcactgcccgctttccagtcgggaaacctgtcgtgccagctgcattaatgaatcggccaacgcgcggggagaggcggtttgcgtattgggcgctcttccgcttcctcgctcactgactcgctgcgctcggtcgttcggctgcggcgagcggtatcagctcactcaaaggcggtaatacggttatccacagaatcaggggataacgcaggaaagaacatgtgagcaaaaggccagcaaaaggccaggaaccgtaaaaaggccgcgttgctggcgtttttccataggctccgcccccctgacgagcatcacaaaaatcgacgctcaagtcagaggtggcgaaacccgacaggactataaagataccaggcgtttccccctggaagctccctcgtgcgctctcctgttccgaccctgccgcttaccggatacctgtccgcctttctcccttcgggaagcgtggcgctttctcatagctcacgctgtaggtatctcagttcggtgtaggtcgttcgctccaagctgggctgtgtgcacgaaccccccgttcagcccgaccgctgcgccttatccggtaactatcgtcttgagtccaacccggtaagacacgacttatcgccactggcagcagccactggtaacaggattagcagagcgaggtatgtaggcggtgctacagagttcttgaagtggtggcctaactacggctacactagaagaacagtatttggtatctgcgctctgctgaagccagttaccttcggaaaaagagttggtagctcttgatccggcaaacaaaccaccgctggtagcggtggtttttttgtttgcaagcagcagattacgcgcagaaaaaaaggatctcaagaagatcctttgatcttttctacggggtctgacgctcagtggaacgaaaactcacgttaagggattttggtcatgagattatcaaaaaggatcttcacctagatccttttaaattaaaaatgaagttttaaatcaatctaaagtatatatgagtaaacttggtctgacagttaccaatgcttaatcagtgaggcacctatctcagcgatctgtctatttcgttcatccatagttgcctgactccccgtcgtgtagataactacgatacgggagggcttaccatctggccccagtgctgcaatgataccgcgagacccacgctcaccggctccagatttatcagcaataaaccagccagccggaagggccgagcgcagaagtggtcctgcaactttatccgcctccatccagtctattaattgttgccgggaagctagagtaagtagttcgccagttaatagtttgcgcaacgttgttgccattgctacaggcatcgtggtgtcacgctcgtcgtttggtatggcttcattcagctccggttcccaacgatcaaggcgagttacatgatcccccatgttgtgcaaaaaagcggttagctccttcggtcctccgatcgttgtcagaagtaagttggccgcagtgttatcactcatggttatggcagcactgcataattctcttactgtcatgccatccgtaagatgcttttctgtgactggtgagtactcaaccaagtcattctgagaatagtgtatgcggcgaccgagttgctcttgcccggcgtcaatacgggataataccgcgccacatagcagaactttaaaagtgctcatcattggaaaacgttcttcggggcgaaaactctcaaggatcttaccgctgttgagatccagttcgatgtaacccactcgtgcacccaactgatcttcagcatcttttactttcaccagcgtttctgggtgagcaaaaacaggaaggcaaaatgccgcaaaaaagggaataagggcgacacggaaatgttgaatactcatactcttcctttttcaatattattgaagcatttatcagggttattgtctcatgagcggatacatatttgaatgtatttagaaaaataaacaaataggggttccgcgcacatttccccgaaaagtgccacctgacgtctaagaaaccattattatcatgacattaacctataaaaataggcgtatcacgaggccctttcgtc

SEQ ID NO: 118 - DNA, 2679 bp, synthetic construct
  source 1..2679: mol_type = other DNA
tcatttttaatttaaaaggatctaggtgaagatcctttttgataatctcatgaccaaaatcccttaacgtgagttttcgttccactgagcgtcagaccccgtagaaaagatcaaaggatcttcttgagatcctttttttctgcgcgtaatctgctgcttgcaaacaaaaaaaccaccgctaccagcggtggtttgtttgccggatcaagagctaccaactctttttccgaaggtaactggcttcagcagagcgcagataccaaatactgttcttctagtgtagccgtagttaggccaccacttcaagaactctgtagcaccgcctacatacctcgctctgctaatcctgttaccagtggctgctgccagtggcgataagtcgtgtcttaccgggttggactcaagacgatagttaccggataaggcgcagcggtcgggctgaacggggggttcgtgcacacagcccagcttggagcgaacgacctacaccgaactgagatacctacagcgtgagctatgagaaagcgccacgcttcccgaagggagaaaggcggacaggtatccggtaagcggcagggtcggaacaggagagcgcacgagggagcttccagggggaaacgcctggtatctttatagtcctgtcgggtttcgccacctctgacttgagcgtcgatttttgtgatgctcgtcaggggggcggagcctatggaaaaacgccagcaacgcggcctttttacggttcctggccttttgctggccttttgctcacatgttctttcctgcgttatcccctgattctgtggataaccgtattaccgcctttgagtgagctgataccgctcgccgcagccgaacgaccgagcgcagcgagtcagtgagcgaggaagcggaagagcgcccaattgaaacctcaggaagacttaacacgataggaagctggaatagtttcgaacgatggttattaatcctaataacggaacgctgtctggaggatgagtgtgacggagtgtaactcagaaagtgaatgaaagacatgaactaaaatattggataccaaaaatttaacctgatcgaaaagcatgaactgccttctgtgtactgggaagcacggtttcaccggtgtctggcagctctaatcttttctagatgcattcgcgaggtaccgagctcgaattcactggccgtcgttttacaacgtcgtgactgggaaaaccctggcgttacccaacttaatcgccttgcagcacatccccctttcgccagctggcgtaatagcgaagaggcccgcaccgatcgcccttcccaacagttgcgcagcctgaatggcgaatggcgcctgatgcggtattttctccttacgcatctgtgcggtatttcacaccgcatatggtgcactctcagtacaatctgctctgatgccgcatagttaagccagccccgacacccgccaacacccgctgacgcgccctgacgggcttgtctgctcccggcatccgcttacagacaagctgtgaccgtctccgggagctgcatgtgtcagaggttttcaccgtcatcaccgaaacgcgcgagacgaaagggcctcgtgatacgcctatttttataggttaatgtcatgataataatggtttcttagacgtcaggtggcacttttcggggaaatgtgcgcggaacccctatttgtttatttttctaaatacattcaaatatgtatccgctcatgagacaataaccctgataaatgcttcaataatattgaaaaaggaagagtatgagtattcaacatttccgtgtcgcccttattcccttttttgcggcattttgccttcctgtttttgctcacccagaaacgctggtgaaagtaaaagatgctgaagatcagttgggtgcacgagtgggttacatcgaactggatctcaacagcggtaagatccttgagagttttcgccccgaagaacgttttccaatgatgagcacttttaaagttctgctatgtggcgcggtattatcccgtattgacgccgggcaagagcaactcggtcgccgcatacactattctcagaatgacttggttgagtactcaccagtcacagaaaagcatcttacggatggcatgacagtaagagaattatgcagtgctgccataaccatgagtgataacactgcggccaacttacttctgacaacgatcggaggaccgaaggagctaaccgcttttttgcacaacatgggggatcatgtaactcgccttgatcgttgggaaccggagctgaatgaagccataccaaacgacgagcgtgacaccacgatgcctgtagcaatggcaacaacgttgcgcaaactattaactggcgaactacttactctagcttcccggcaacaattaatagactggatggaggcggataaagttgcaggaccacttctgcgctcggcccttccggctggctggtttattgctgataaatctggagccggtgagcgtgggtctcgcggtatcattgcagcactggggccagatggtaagccctcccgtatcgtagttatctacacgacggggagtcaggcaactatggatgaacgaaatagacagatcgctgagataggtgcctcactgattaagcattggtaactgtcagaccaagtttactcatatatactttagattgatttaaaact

SEQ ID NO: 119 - DNA, 3714 bp, synthetic construct
  source 1..3714: mol_type = other DNA
aatggtttcttagacgtcaggtggcacttttcggggaaatgtgcgcggaacccctatttgtttatttttctaaatacattcaaatatgtatccgctcatgagacaataaccctgataaatgcttcaataatattgaaaaaggaagagtatgagtattcaacatttccgtgtcgcccttattcccttttttgcggcattttgccttcctgtttttgctcacccagaaacgctggtgaaagtaaaagatgctgaagatcagttgggtgcacgagtgggttacatcgaactggatctcaacagcggtaagatccttgagagttttcgccccgaagaacgttttccaatgatgagcacttttaaagttctgctatgtggcgcggtattatcccgtattgacgccgggcaagagcaactcggtcgccgcatacactattctcagaatgacttggttgagtactcaccagtcacagaaaagcatcttacggatggcatgacagtaagagaattatgcagtgctgccataaccatgagtgataacactgcggccaacttacttctgacaacgatcggaggaccgaaggagctaaccgcttttttgcacaacatgggggatcatgtaactcgccttgatcgttgggaaccggagctgaatgaagccataccaaacgacgagcgtgacaccacgatgcctgtagcaatggcaacaacgttgcgcaaactattaactggcgaactacttactctagcttcccggcaacaattaatagactggatggaggcggataaagttgcaggaccacttctgcgctcggcccttccggctggctggtttattgctgataaatctggagccggtgagcgtgggtctcgcggtatcattgcagcactggggccagatggtaagccctcccgtatcgtagttatctacacgacggggagtcaggcaactatggatgaacgaaatagacagatcgctgagataggtgcctcactgattaagcattggtaactgtcagaccaagtttactcatatatactttagattgatttaaaacttcatttttaatttaaaaggatctaggtgaagatcctttttgataatctcatgaccaaaatcccttaacgtgagttttcgttccactgagcgtcagaccccgtagaaaagatcaaaggatcttcttgagatcctttttttctgcgcgtaatctgctgcttgcaaacaaaaaaaccaccgctaccagcggtggtttgtttgccggatcaagagctaccaactctttttccgaaggtaactggcttcagcagagcgcagataccaaatactgttcttctagtgtagccgtagttaggccaccacttcaagaactctgtagcaccgcctacatacctcgctctgctaatcctgttaccagtggctgctgccagtggcgataagtcgtgtcttaccgggttggactcaagacgatagttaccggataaggcgcagcggtcgggctgaacggggggttcgtgcacacagcccagcttggagcgaacgacctacaccgaactgagatacctacagcgtgagctatgagaaagcgccacgcttcccgaagggagaaaggcggacaggtatccggtaagcggcagggtcggaacaggagagcgcacgagggagcttccagggggaaacgcctggtatctttatagtcctgtcgggtttcgccacctctgacttgagcgtcgatttttgtgatgctcgtcaggggggcggagcctatggaaaaacgccagcaacgcggcctttttacggttcctggccttttgctggccttttgctcacatgttctttcctgcgttatcccctgattctgtggataaccgtattaccgcctttgagtgagctgataccgctcgccgcagccgaacgaccgagcgcagcgagtcagtgagcgaggaagcggaagagcgcccaattgaaacctcaggaagacttaacacgataggaagctggaatagtttcgaacgatggttattaatcctaataacggaacgctgtctggaggatgagtgtgacggagtgtaactcagaaagtgaatgaaagacatgaactaaaatattggataccaaaaatttaacatctttccgaaagaagtctcccacttctaaacgaagtgaaagtgggagatgaatttcggttaggtatagcctaaaattgtctcttttttgtgtgttatgatataatcagttttagaaaaatgaaaggctgttgtatcaggttacctgatcggcacgtaagaggttccaactttcaccataatgaaataagatcactaccgggcgtattttttgagttatcgagattttcaggagctaaggaagctagttaacatggagaaaaaaatcactggatataccaccgttgatatatcccaatggcatcgtaaagaacattttgaggcatttcagtcagttgctcaatgtacctataaccagaccgttcagctggatattacggcctttttaaagaccgtaaagaaaaataagcacaagttttatccggcctttattcacattcttgcccgcctgatgaatgctcatccggagttccgtatggcaatgaaagacggtgagctggtgatatgggatagtgttcacccttgttacaccgttttccatgagcaaactgaaacgttttcatcgctctggagtgaataccacgacgatttccggcagtttctacacatatattcgcaagatgtggcgtgttacggtgaaaacctggcctatttccctaaagggtttattgagaatatgtttttcgtctcagccaatccctgggtgagtttcaccagttttgatttaaacgtggccaatatggacaacttcttcgcccccgttttcactatgggcaaatattatacgcaaggcgacaaggtgctgatgccgctggcgattcaggttcatcatgccgtttgtgatggcttccatgtcggcagaatgcttaatgaattacaacagtactgcgatgagtggcagggcggggcgtaacacgtgtttgtcctcgaaccgtggggcacacggggatcgctcggtcaacttcccatcatgagatgggattacccgagaagcccccacctctaagcgaagcgtaggtggtgggagtatgtcacgctgatcgaaaagcatgaactgccttctgtgtactgggaagcacggtttcaccggtgtctggcagctctaatcttttctagatgcattcgcgaggtaccgagctcgaattcactggccgtcgttttacaacgtcgtgactgggaaaaccctggcgttacccaacttaatcgccttgcagcacatccccctttcgccagctggcgtaatagcgaagaggcccgcaccgatcgcccttcccaacagttgcgcagcctgaatggcgaatggcgcctgatgcggtattttctccttacgcatctgtgcggtatttcacaccgcatatggtgcactctcagtacaatctgctctgatgccgcatagttaagccagccccgacacccgccaacacccgctgacgcgccctgacgggcttgtctgctcccggcatccgcttacagacaagctgtgaccgtctccgggagctgcatgtgtcagaggttttcaccgtcatcaccgaaacgcgcgagacgaaagggcctcgtgatacgcctatttttataggttaatgtcatgataat

SEQ ID NO: 120 - DNA, 4546 bp, synthetic construct
  source 1..4546: mol_type = other DNA
aatggtttcttagacgtcaggtggcacttttcggggaaatgtgcgcggaacccctatttgtttatttttctaaatacattcaaatatgtatccgctcatgagacaataaccctgataaatgcttcaataatattgaaaaaggaagagtatgagtattcaacatttccgtgtcgcccttattcccttttttgcggcattttgccttcctgtttttgctcacccagaaacgctggtgaaagtaaaagatgctgaagatcagttgggtgcacgagtgggttacatcgaactggatctcaacagcggtaagatccttgagagttttcgccccgaagaacgttttccaatgatgagcacttttaaagttctgctatgtggcgcggtattatcccgtattgacgccgggcaagagcaactcggtcgccgcatacactattctcagaatgacttggttgagtactcaccagtcacagaaaagcatcttacggatggcatgacagtaagagaattatgcagtgctgccataaccatgagtgataacactgcggccaacttacttctgacaacgatcggaggaccgaaggagctaaccgcttttttgcacaacatgggggatcatgtaactcgccttgatcgttgggaaccggagctgaatgaagccataccaaacgacgagcgtgacaccacgatgcctgtagcaatggcaacaacgttgcgcaaactattaactggcgaactacttactctagcttcccggcaacaattaatagactggatggaggcggataaagttgcaggaccacttctgcgctcggcccttccggctggctggtttattgctgataaatctggagccggtgagcgtgggtctcgcggtatcattgcagcactggggccagatggtaagccctcccgtatcgtagttatctacacgacggggagtcaggcaactatggatgaacgaaatagacagatcgctgagataggtgcctcactgattaagcattggtaactgtcagaccaagtttactcatatatactttagattgatttaaaacttcatttttaatttaaaaggatctaggtgaagatcctttttgataatctcatgaccaaaatcccttaacgtgagttttcgttccactgagcgtcagaccccgtagaaaagatcaaaggatcttcttgagatcctttttttctgcgcgtaatctgctgcttgcaaacaaaaaaaccaccgctaccagcggtggtttgtttgccggatcaagagctaccaactctttttccgaaggtaactggcttcagcagagcgcagataccaaatactgttcttctagtgtagccgtagttaggccaccacttcaagaactctgtagcaccgcctacatacctcgctctgctaatcctgttaccagtggctgctgccagtggcgataagtcgtgtcttaccgggttggactcaagacgatagttaccggataaggcgcagcggtcgggctgaacggggggttcgtgcacacagcccagcttggagcgaacgacctacaccgaactgagatacctacagcgtgagctatgagaaagcgccacgcttcccgaagggagaaaggcggacaggtatccggtaagcggcagggtcggaacaggagagcgcacgagggagcttccagggggaaacgcctggtatctttatagtcctgtcgggtttcgccacctctgacttgagcgtcgatttttgtgatgctcgtcaggggggcggagcctatggaaaaacgccagcaacgcggcctttttacggttcctggccttttgctggccttttgctcacatgttctttcctgcgttatcccctgattctgtggataaccgtattaccgcctttgagtgagctgataccgctcgccgcagccgaacgaccgagcgcagcgagtcagtgagcgaggaagcggaagagcgcccaatacgcaaaccgcctctccccgcgcgttggccgattcattaatgcagctggcacgacaggtttcccgactggaaagcgggcagtgagcgcaacgcaattaatgtgagttagctcactcattaggcaccccaggctttacactttatgcttccggctcgtatgttgtgtggaattgtgagcggataacaatttcacacaggaaacagctatgaccatgattacgccaagcttgcatgcaggcctctgcagtcgacgggcccgggatcccttaagatttaatacgactcactataggggaattgtgagcggataacaattcccggcgcgccgacttcgagcgaaggagacttcgaatgaagttggataataacaaccatagcgtcttccttctgtactatcatttggtattagttgtcaagtatcgtcgccaggtgattgatgacacaatctcggattacgcgaaggatatgtttgtccgtttaggtaagaattacaacattagcctggtagagtggaatcatgacatggaccatgttcacatcttattcaaagctcaccccaactcggaattgtcgaagttcattaatgcgtacaagtctgcttcaagtcgccttattaagaagcattttcctcaagtaaagcgcaaattgtggaaggagtacttttggtcccgctcattttgcctgcttacaacaggaggagcgcctatcgaggtcatcaaaaaatacatcgaaaatcaggggatgaaatgataacctaggcttgctgcctgcgctgagcaataactagcataaccccttggggcctctaaacgggtcttgaggggttttttgctgaaacctcaggaagacttaacacgataggaagctggaatagtttcgaacgatggttattaatcctaataacggaacgctgtctggaggatgagtgtgacggagtgtaactcagaaagtgaatgaaagacatgaactaaaatattggataccaaaaatttaacatctttccgaaagaagtctcccacttctaaacgaagtgaaagtgggagatgaatttcggttaggtatagcctaaaattgtctcttttttgtgtgttatgatataatcagttttagaaaaatgaaaggctgttgtatcaggttacctgatcggcacgtaagaggttccaactttcaccataatgaaataagatcactaccgggcgtattttttgagttatcgagattttcaggagctaaggaagctagttaacatggagaaaaaaatcactggatataccaccgttgatatatcccaatggcatcgtaaagaacattttgaggcatttcagtcagttgctcaatgtacctataaccagaccgttcagctggatattacggcctttttaaagaccgtaaagaaaaataagcacaagttttatccggcctttattcacattcttgcccgcctgatgaatgctcatccggagttccgtatggcaatgaaagacggtgagctggtgatatgggatagtgttcacccttgttacaccgttttccatgagcaaactgaaacgttttcatcgctctggagtgaataccacgacgatttccggcagtttctacacatatattcgcaagatgtggcgtgttacggtgaaaacctggcctatttccctaaagggtttattgagaatatgtttttcgtctcagccaatccctgggtgagtttcaccagttttgatttaaacgtggccaatatggacaacttcttcgcccccgttttcactatgggcaaatattatacgcaaggcgacaaggtgctgatgccgctggcgattcaggttcatcatgccgtttgtgatggcttccatgtcggcagaatgcttaatgaattacaacagtactgcgatgagtggcagggcggggcgtaacacgtgtttgtcctcgaaccgtggggcacacggggatcgctcggtcaacttcccatcatgagatgggattacccgagaagcccccacctctaagcgaagcgtaggtggtgggagtatgtcacgctgatcgaaaagcatgaactgccttctgtgtactgggaagcacggtttcaccggtgtctggcagctctaatcttttctagatgcattcgcgaggtaccgagctcgaattcactggccgtcgttttacaacgtcgtgactgggaaaaccctggcgttacccaacttaatcgccttgcagcacatccccctttcgccagctggcgtaatagcgaagaggcccgcaccgatcgcccttcccaacagttgcgcagcctgaatggcgaatggcgcctgatgcggtattttctccttacgcatctgtgcggtatttcacaccgcatatggtgcactctcagtacaatctgctctgatgccgcatagttaagccagccccgacacccgccaacacccgctgacgcgccctgacgggcttgtctgctcccggcatccgcttacagacaagctgtgaccgtctccgggagctgcatgtgtcagaggttttcaccgtcatcaccgaaacgcgcgagacgaaagggcctcgtgatacgcctatttttataggttaatgtcatgataat

SEQ ID NO: 121 - DNA, 4546 bp, synthetic construct
  source 1..4546: mol_type = other DNA
aatggtttcttagacgtcaggtggcacttttcggggaaatgtgcgcggaacccctatttgtttatttttctaaatacattcaaatatgtatccgctcatgagacaataaccctgataaatgcttcaataatattgaaaaaggaagagtatgagtattcaacatttccgtgtcgcccttattcccttttttgcggcattttgccttcctgtttttgctcacccagaaacgctggtgaaagtaaaagatgctgaagatcagttgggtgcacgagtgggttacatcgaactggatctcaacagcggtaagatccttgagagttttcgccccgaagaacgttttccaatgatgagcacttttaaagttctgctatgtggcgcggtattatcccgtattgacgccgggcaagagcaactcggtcgccgcatacactattctcagaatgacttggttgagtactcaccagtcacagaaaagcatcttacggatggcatgacagtaagagaattatgcagtgctgccataaccatgagtgataacactgcggccaacttacttctgacaacgatcggaggaccgaaggagctaaccgcttttttgcacaacatgggggatcatgtaactcgccttgatcgttgggaaccggagctgaatgaagccataccaaacgacgagcgtgacaccacgatgcctgtagcaatggcaacaacgttgcgcaaactattaactggcgaactacttactctagcttcccggcaacaattaatagactggatggaggcggataaagttgcaggaccacttctgcgctcggcccttccggctggctggtttattgctgataaatctggagccggtgagcgtgggtctcgcggtatcattgcagcactggggccagatggtaagccctcccgtatcgtagttatctacacgacggggagtcaggcaactatggatgaacgaaatagacagatcgctgagataggtgcctcactgattaagcattggtaactgtcagaccaagtttactcatatatactttagattgatttaaaacttcatttttaatttaaaaggatctaggtgaagatcctttttgataatctcatgaccaaaatcccttaacgtgagttttcgttccactgagcgtcagaccccgtagaaaagatcaaaggatcttcttgagatcctttttttctgcgcgtaatctgctgcttgcaaacaaaaaaaccaccgctaccagcggtggtttgtttgccggatcaagagctaccaactctttttccgaaggtaactggcttcagcagagcgcagataccaaatactgttcttctagtgtagccgtagttaggccaccacttcaagaactctgtagcaccgcctacatacctcgctctgctaatcctgttaccagtggctgctgccagtggcgataagtcgtgtcttaccgggttggactcaagacgatagttaccggataaggcgcagcggtcgggctgaacggggggttcgtgcacacagcccagcttggagcgaacgacctacaccgaactgagatacctacagcgtgagctatgagaaagcgccacgcttcccgaagggagaaaggcggacaggtatccggtaagcggcagggtcggaacaggagagcgcacgagggagcttccagggggaaacgcctggtatctttatagtcctgtcgggtttcgccacctctgacttgagcgtcgatttttgtgatgctcgtcaggggggcggagcctatggaaaaacgccagcaacgcggcctttttacggttcctggccttttgctggccttttgctcacatgttctttcctgcgttatcccctgattctgtggataaccgtattaccgcctttgagtgagctgataccgctcgccgcagccgaacgaccgagcgcagcgagtcagtgagcgaggaagcggaagagcgcccaatacgcaaaccgcctctccccgcgcgttggccgattcattaatgcagctggcacgacaggtttcccgactggaaagcgggcagtgagcgcaacgcaattaatgtgagttagctcactcattaggcaccccaggctttacactttatgcttccggctcgtatgttgtgtggaattgtgagcggataacaatttcacacaggaaacagctatgaccatgattacgccaagcttgcatgcaggcctctgcagtcgacgggcccgggatcccttaagatttaatacgactcactataggggaattgtgagcggataacaattcccggcgcgccgacttcgagcgaaggagacttcgaatgaagttggataataacaaccatagcgtcttccttctgtactatcatttggtattagttgtcaagtatcgtcgccaggtgattgatgacacaatctcggattacgcgaaggatatgtttgtccgtttaggtaagaattacaacattagcctggtagagtggaatcatgacatggaccatgttcacatcttattcaaagctcaccccaactcggaattgtcgaagttcattaatgcgtacaagtctgcttcaagtcgccttattaagaagcattttcctcaagtaaagcgcaaattgtggaaggagtacttttggtcccgctcattttgcctgcttacaacaggaggagcgcctatcgaggtcatcaaaaaagccatcgaaaatcaggggatgaaatgataacctaggcttgctgcctgcgctgagcaataactagcataaccccttggggcctctaaacgggtcttgaggggttttttgctgaaacctcaggaagacttaacacgataggaagctggaatagtttcgaacgatggttattaatcctaataacggaacgctgtctggaggatgagtgtgacggagtgtaactcagaaagtgaatgaaagacatgaactaaaatattggataccaaaaatttaacatctttccgaaagaagtctcccacttctaaacgaagtgaaagtgggagatgaatttcggttaggtatagcctaaaattgtctcttttttgtgtgttatgatataatcagttttagaaaaatgaaaggctgttgtatcaggttacctgatcggcacgtaagaggttccaactttcaccataatgaaataagatcactaccgggcgtattttttgagttatcgagattttcaggagctaaggaagctagttaacatggagaaaaaaatcactggatataccaccgttgatatatcccaatggcatcgtaaagaacattttgaggcatttcagtcagttgctcaatgtacctataaccagaccgttcagctggatattacggcctttttaaagaccgtaaagaaaaataagcacaagttttatccggcctttattcacattcttgcccgcctgatgaatgctcatccggagttccgtatggcaatgaaagacggtgagctggtgatatgggatagtgttcacccttgttacaccgttttccatgagcaaactgaaacgttttcatcgctctggagtgaataccacgacgatttccggcagtttctacacatatattcgcaagatgtggcgtgttacggtgaaaacctggcctatttccctaaagggtttattgagaatatgtttttcgtctcagccaatccctgggtgagtttcaccagttttgatttaaacgtggccaatatggacaacttcttcgcccccgttttcactatgggcaaatattatacgcaaggcgacaaggtgctgatgccgctggcgattcaggttcatcatgccgtttgtgatggcttccatgtcggcagaatgcttaatgaattacaacagtactgcgatgagtggcagggcggggcgtaacacgtgtttgtcctcgaaccgtggggcacacggggatcgctcggtcaacttcccatcatgagatgggattacccgagaagcccccacctctaagcgaagcgtaggtggtgggagtatgtcacgctgatcgaaaagcatgaactgccttctgtgtactgggaagcacggtttcaccggtgtctggcagctctaatcttttctagatgcattcgcgaggtaccgagctcgaattcactggccgtcgttttacaacgtcgtgactgggaaaaccctggcgttacccaacttaatcgccttgcagcacatccccctttcgccagctggcgtaatagcgaagaggcccgcaccgatcgcccttcccaacagttgcgcagcctgaatggcgaatggcgcctgatgcggtattttctccttacgcatctgtgcggtatttcacaccgcatatggtgcactctcagtacaatctgctctgatgccgcatagttaagccagccccgacacccgccaacacccgctgacgcgccctgacgggcttgtctgctcccggcatccgcttacagacaagctgtgaccgtctccgggagctgcatgtgtcagaggttttcaccgtcatcaccgaaacgcgcgagacgaaagggcctcgtgatacgcctatttttataggttaatgtcatgataat

SEQ ID NO: 122 - DNA, 4530 bp, synthetic construct
  source 1..4530: mol_type = other DNA
taatttaaaaggatctaggtgaagatcctttttgataatctcatgaccaaaatcccttaacgtgagttttcgttccactgagcgtcagaccccgtagaaaagatcaaaggatcttcttgagatcctttttttctgcgcgtaatctgctgcttgcaaacaaaaaaaccaccgctaccagcggtggtttgtttgccggatcaagagctaccaactctttttccgaaggtaactggcttcagcagagcgcagataccaaatactgttcttctagtgtagccgtagttaggccaccacttcaagaactctgtagcaccgcctacatacctcgctctgctaatcctgttaccagtggctgctgccagtggcgataagtcgtgtcttaccgggttggactcaagacgatagttaccggataaggcgcagcggtcgggctgaacggggggttcgtgcacacagcccagcttggagcgaacgacctacaccgaactgagatacctacagcgtgagctatgagaaagcgccacgcttcccgaagggagaaaggcggacaggtatccggtaagcggcagggtcggaacaggagagcgcacgagggagcttccagggggaaacgcctggtatctttatagtcctgtcgggtttcgccacctctgacttgagcgtcgatttttgtgatgctcgtcaggggggcggagcctatggaaaaacgccagcaacgcggcctttttacggttcctggccttttgctggccttttgctcacatgttctttcctgcgttatcccctgattctgtggataaccgtattaccgcctttgagtgagctgataccgctcgccgcagccgaacgaccgagcgcagcgagtcagtgagcgaggaagcggaagagcgcccaatacgcaaaccgcctctccccgcgcgttggccgattcattaatgcagctggcacgacaggtttcccgactggaaagcgggcagtgagcgcaacgcaattaatgtgagttagctcactcattaggcaccccaggctttacactttatgcttccggctcgtatgttgtgtggaattgtgagcggataacaatttcacacaggaaacagctatgaccatgattacgccaagcttgcatgcaggcctctgcagtcgacgggcccgggatcccttaagatttaatacgactcactataggggaattgtgagcggataacaattcccggcgcgccgacttcgagcgaaggagacttcgaatgaagttggataataacaaccatagcgtcttccttctgtactatcatttggtattagttgtcaagtatcgtcgccaggtgattgatgacacaatctcggattacgcgaaggatatgtttgtccgtttaggtaagaattacaacattagcctggtagagtggaatcatgacatggaccatgttcacatcttattcaaagctcaccccaactcggaattgtcgaagttcattaatgcgtacaagtctgcttcaagtcgccttattaagaagcattttcctcaagtaaagcgcaaattgtggaaggagtacttttggtcccgctcattttgcctgcttacaacaggaggagcgcctatcgaggtcatcaaaaaatacatcgaaaatcaggggatgaaatgataacctaggcttgctgcctgcgctgagcaataactagcataaccccttggggcctctaaacgggtcttgaggggttttttgctgaaacctcaggaagacttaacacgataggaagctggaatagtttcgaacgatggttattaatcctaataacggaacgctgtctggaggatgagtgtgacggagtgtaactctcatccgtggattggcggagcgggcctcgtaaaaggctcgttttttttatcttaattaggcgagaagactcccacttcaacgaagcgaagcggagtaagtgggagatgaatcgccttaactatattttgctgaaaataggatagattcagtaaaatatagtatcatatagttagatgggaggtgaaaacggttacctgatcggcacgtaagaggttccaactttcaccataatgaaataagatcactaccgggcgtattttttgagttatcgagattttcaggagctaaggaagctagttaacatggagaaaaaaatcactggatataccaccgttgatatatcccaatggcatcgtaaagaacattttgaggcatttcagtcagttgctcaatgtacctataaccagaccgttcagctggatattacggcctttttaaagaccgtaaagaaaaataagcacaagttttatccggcctttattcacattcttgcccgcctgatgaatgctcatccggagttccgtatggcaatgaaagacggtgagctggtgatatgggatagtgttcacccttgttacaccgttttccatgagcaaactgaaacgttttcatcgctctggagtgaataccacgacgatttccggcagtttctacacatatattcgcaagatgtggcgtgttacggtgaaaacctggcctatttccctaaagggtttattgagaatatgtttttcgtctcagccaatccctgggtgagtttcaccagttttgatttaaacgtggccaatatggacaacttcttcgcccccgttttcactatgggcaaatattatacgcaaggcgacaaggtgctgatgccgctggcgattcaggttcatcatgccgtttgtgatggcttccatgtcggcagaatgcttaatgaattacaacagtactgcgatgagtggcagggcggggcgtaacacgtgcacgcctcaaagaataaggattgcttgaagcagtcaaacttctttggaagcccccacttcaaattttcgctagaaaattaagtgggggtagttcacggacaagtggttcaccatgcgttgctttatggtatgatagagcgtgaggtgaggaccggtgtctggcagctctaatcttttctagatgcattcgcgaggtaccgagctcgaattcactggccgtcgttttacaacgtcgtgactgggaaaaccctggcgttacccaacttaatcgccttgcagcacatccccctttcgccagctggcgtaatagcgaagaggcccgcaccgatcgcccttcccaacagttgcgcagcctgaatggcgaatggcgcctgatgcggtattttctccttacgcatctgtgcggtatttcacaccgcatatggtgcactctcagtacaatctgctctgatgccgcatagttaagccagccccgacacccgccaacacccgctgacgcgccctgacgggcttgtctgctcccggcatccgcttacagacaagctgtgaccgtctccgggagctgcatgtgtcagaggttttcaccgtcatcaccgaaacgcgcgagacgaaagggcctcgtgatacgcctatttttataggttaatgtcatgataataatggtttcttagacgtcaggtggcacttttcggggaaatgtgcgcggaacccctatttgtttatttttctaaatacattcaaatatgtatccgctcatgagacaataaccctgataaatgcttcaataatattgaaaaaggaagagtatgagtattcaacatttccgtgtcgcccttattcccttttttgcggcattttgccttcctgtttttgctcacccagaaacgctggtgaaagtaaaagatgctgaagatcagttgggtgcacgagtgggttacatcgaactggatctcaacagcggtaagatccttgagagttttcgccccgaagaacgttttccaatgatgagcacttttaaagttctgctatgtggcgcggtattatcccgtattgacgccgggcaagagcaactcggtcgccgcatacactattctcagaatgacttggttgagtactcaccagtcacagaaaagcatcttacggatggcatgacagtaagagaattatgcagtgctgccataaccatgagtgataacactgcggccaacttacttctgacaacgatcggaggaccgaaggagctaaccgcttttttgcacaacatgggggatcatgtaactcgccttgatcgttgggaaccggagctgaatgaagccataccaaacgacgagcgtgacaccacgatgcctgtagcaatggcaacaacgttgcgcaaactattaactggcgaactacttactctagcttcccggcaacaattaatagactggatggaggcggataaagttgcaggaccacttctgcgctcggcccttccggctggctggtttattgctgataaatctggagccggtgagcgtgggtctcgcggtatcattgcagcactggggccagatggtaagccctcccgtatcgtagttatctacacgacggggagtcaggcaactatggatgaacgaaatagacagatcgctgagataggtgcctcactgattaagcattggtaactgtcagaccaagtttactcatatatactttagattgatttaaaacttcatttt

SEQ ID NO: 123 - DNA, 4597 bp, synthetic construct
  source 1..4597: mol_type = other DNA
aatggtttcttagacgtcaggtggcacttttcggggaaatgtgcgcggaacccctatttgtttatttttctaaatacattcaaatatgtatccgctcatgagacaataaccctgataaatgcttcaataatattgaaaaaggaagagtatgagtattcaacatttccgtgtcgcccttattcccttttttgcggcattttgccttcctgtttttgctcacccagaaacgctggtgaaagtaaaagatgctgaagatcagttgggtgcacgagtgggttacatcgaactggatctcaacagcggtaagatccttgagagttttcgccccgaagaacgttttccaatgatgagcacttttaaagttctgctatgtggcgcggtattatcccgtattgacgccgggcaagagcaactcggtcgccgcatacactattctcagaatgacttggttgagtactcaccagtcacagaaaagcatcttacggatggcatgacagtaagagaattatgcagtgctgccataaccatgagtgataacactgcggccaacttacttctgacaacgatcggaggaccgaaggagctaaccgcttttttgcacaacatgggggatcatgtaactcgccttgatcgttgggaaccggagctgaatgaagccataccaaacgacgagcgtgacaccacgatgcctgtagcaatggcaacaacgttgcgcaaactattaactggcgaactacttactctagcttcccggcaacaattaatagactggatggaggcggataaagttgcaggaccacttctgcgctcggcccttccggctggctggtttattgctgataaatctggagccggtgagcgtgggtctcgcggtatcattgcagcactggggccagatggtaagccctcccgtatcgtagttatctacacgacggggagtcaggcaactatggatgaacgaaatagacagatcgctgagataggtgcctcactgattaagcattggtaactgtcagaccaagtttactcatatatactttagattgatttaaaacttcatttttaatttaaaaggatctaggtgaagatcctttttgataatctcatgaccaaaatcccttaacgtgagttttcgttccactgagcgtcagaccccgtagaaaagatcaaaggatcttcttgagatcctttttttctgcgcgtaatctgctgcttgcaaacaaaaaaaccaccgctaccagcggtggtttgtttgccggatcaagagctaccaactctttttccgaaggtaactggcttcagcagagcgcagataccaaatactgttcttctagtgtagccgtagttaggccaccacttcaagaactctgtagcaccgcctacatacctcgctctgctaatcctgttaccagtggctgctgccagtggcgataagtcgtgtcttaccgggttggactcaagacgatagttaccggataaggcgcagcggtcgggctgaacggggggttcgtgcacacagcccagcttggagcgaacgacctacaccgaactgagatacctacagcgtgagctatgagaaagcgccacgcttcccgaagggagaaaggcggacaggtatccggtaagcggcagggtcggaacaggagagcgcacgagggagcttccagggggaaacgcctggtatctttatagtcctgtcgggtttcgccacctctgacttgagcgtcgatttttgtgatgctcgtcaggggggcggagcctatggaaaaacgccagcaacgcggcctttttacggttcctggccttttgctggccttttgctcacatgttctttcctgcgttatcccctgattctgtggataaccgtattaccgcctttgagtgagctgataccgctcgccgcagccgaacgaccgagcgcagcgagtcagtgagcgaggaagcggaagagcgcccaatacgcaaaccgcctctccccgcgcgttggccgattcattaatgcagctggcacgacaggtttcccgactggaaagcgggcagtgagcgcaacgcaattaatgtgagttagctcactcattaggcaccccaggctttacactttatgcttccggctcgtatgttgtgtggaattgtgagcggataacaatttcacacaggaaacagctatgaccatgattacgccaagcttgcatgcaggcctctgcagtcgacgggcccgggatcccttaagatttaatacgactcactataggggaattgtgagcggataacaattcccggcgcgccgacttcgagcgaaggagacttcgaatgaagttggataataacaaccatagcgtcttccttctgtactatcatttggtattagttgtcaagtatcgtcgccaggtgattgatgacacaatctcggattacgcgaaggatatgtttgtccgtttaggtaagaattacaacattagcctggtagagtggaatcatgacatggaccatgttcacatcttattcaaagctcaccccaactcggaattgtcgaagttcattaatgcgtacaagtctgcttcaagtcgccttattaagaagcattttcctcaagtaaagcgcaaattgtggaaggagtacttttggtcccgctcattttgcctgcttacaacaggaggagcgcctatcgaggtcatcaaaaaatacatcgaaaatcaggggatgaaatgataacctaggcttgctgcctgcgctgagcaataactagcataaccccttggggcctctaaacgggtcttgaggggttttttgctgaaacctcaggaagacttaacacgataggaagctggaatagtttcgaacgatggttattaatcctaataacggaacgctgtctggaggatgagtgtgacggagtgtaactctttccagacaaatcgaaaccgctgtccctaaatgcgagggacagcgattttttaacataaatcagccagaagtcccccacctctacaggtgggggatgaatggcgttcggtttttctgtttttctctttcttctttggatggcaatagaatacaataaacataggaggtgaaacgggttacctgatcggcacgtaagaggttccaactttcaccataatgaaataagatcactaccgggcgtattttttgagttatcgagattttcaggagctaaggaagctagttaacatggagaaaaaaatcactggatataccaccgttgatatatcccaatggcatcgtaaagaacattttgaggcatttcagtcagttgctcaatgtacctataaccagaccgttcagctggatattacggcctttttaaagaccgtaaagaaaaataagcacaagttttatccggcctttattcacattcttgcccgcctgatgaatgctcatccggagttccgtatggcaatgaaagacggtgagctggtgatatgggatagtgttcacccttgttacaccgttttccatgagcaaactgaaacgttttcatcgctctggagtgaataccacgacgatttccggcagtttctacacatatattcgcaagatgtggcgtgttacggtgaaaacctggcctatttccctaaagggtttattgagaatatgtttttcgtctcagccaatccctgggtgagtttcaccagttttgatttaaacgtggccaatatggacaacttcttcgcccccgttttcactatgggcaaatattatacgcaaggcgacaaggtgctgatgccgctggcgattcaggttcatcatgccgtttgtgatggcttccatgtcggcagaatgcttaatgaattacaacagtactgcgatgagtggcagggcggggcgtaacacgtggtatgaagtcgtagatggcgagttcccgcccttgagtatcatggatactcatgttgcctgtggctcccaacgggacgggtgccaggtgttgcctgcagataggctgccaaccagcctatcatgcatccacctccgaaggggaaacaggaaacccccacttcgataagtgggggaggttcatcggtcattttcccgtgttttcgttctctgtctccagcgcagcgcgcaaaaaccggtgtctggcagctctaatcttttctagatgcattcgcgaggtaccgagctcgaattcactggccgtcgttttacaacgtcgtgactgggaaaaccctggcgttacccaacttaatcgccttgcagcacatccccctttcgccagctggcgtaatagcgaagaggcccgcaccgatcgcccttcccaacagttgcgcagcctgaatggcgaatggcgcctgatgcggtattttctccttacgcatctgtgcggtatttcacaccgcatatggtgcactctcagtacaatctgctctgatgccgcatagttaagccagccccgacacccgccaacacccgctgacgcgccctgacgggcttgtctgctcccggcatccgcttacagacaagctgtgaccgtctccgggagctgcatgtgtcagaggttttcaccgtcatcaccgaaacgcgcgagacgaaagggcctcgtgatacgcctatttttataggttaatgtcatgataat

SEQ ID NO: 124 - DNA, 4692 bp, synthetic construct
  source 1..4692: mol_type = other DNA
aatggtttcttagacgtcaggtggcacttttcggggaaatgtgcgcggaacccctatttgtttatttttctaaatacattcaaatatgtatccgctcatgagacaataaccctgataaatgcttcaataatattgaaaaaggaagagtatgagtattcaacatttccgtgtcgcccttattcccttttttgcggcattttgccttcctgtttttgctcacccagaaacgctggtgaaagtaaaagatgctgaagatcagttgggtgcacgagtgggttacatcgaactggatctcaacagcggtaagatccttgagagttttcgccccgaagaacgttttccaatgatgagcacttttaaagttctgctatgtggcgcggtattatcccgtattgacgccgggcaagagcaactcggtcgccgcatacactattctcagaatgacttggttgagtactcaccagtcacagaaaagcatcttacggatggcatgacagtaagagaattatgcagtgctgccataaccatgagtgataacactgcggccaacttacttctgacaacgatcggaggaccgaaggagctaaccgcttttttgcacaacatgggggatcatgtaactcgccttgatcgttgggaaccggagctgaatgaagccataccaaacgacgagcgtgacaccacgatgcctgtagcaatggcaacaacgttgcgcaaactattaactggcgaactacttactctagcttcccggcaacaattaatagactggatggaggcggataaagttgcaggaccacttctgcgctcggcccttccggctggctggtttattgctgataaatctggagccggtgagcgtgggtctcgcggtatcattgcagcactggggccagatggtaagccctcccgtatcgtagttatctacacgacggggagtcaggcaactatggatgaacgaaatagacagatcgctgagataggtgcctcactgattaagcattggtaactgtcagaccaagtttactcatatatactttagattgatttaaaacttcatttttaatttaaaaggatctaggtgaagatcctttttgataatctcatgaccaaaatcccttaacgtgagttttcgttccactgagcgtcagaccccgtagaaaagatcaaaggatcttcttgagatcctttttttctgcgcgtaatctgctgcttgcaaacaaaaaaaccaccgctaccagcggtggtttgtttgccggatcaagagctaccaactctttttccgaaggtaactggcttcagcagagcgcagataccaaatactgttcttctagtgtagccgtagttaggccaccacttcaagaactctgtagcaccgcctacatacctcgctctgctaatcctgttaccagtggctgctgccagtggcgataagtcgtgtcttaccgggttggactcaagacgatagttaccggataaggcgcagcggtcgggctgaacggggggttcgtgcacacagcccagcttggagcgaacgacctacaccgaactgagatacctacagcgtgagctatgagaaagcgccacgcttcccgaagggagaaaggcggacaggtatccggtaagcggcagggtcggaacaggagagcgcacgagggagcttccagggggaaacgcctggtatctttatagtcctgtcgggtttcgccacctctgacttgagcgtcgatttttgtgatgctcgtcaggggggcggagcctatggaaaaacgccagcaacgcggcctttttacggttcctggccttttgctggccttttgctcacatgttctttcctgcgttatcccctgattctgtggataaccgtattaccgcctttgagtgagctgataccgctcgccgcagccgaacgaccgagcgcagcgagtcagtgagcgaggaagcggaagagcgcccaatacgcaaaccgcctctccccgcgcgttggccgattcattaatgcagctggcacgacaggtttcccgactggaaagcgggcagtgagcgcaacgcaattaatgtgagttagctcactcattaggcaccccaggctttacactttatgcttccggctcgtatgttgtgtggaattgtgagcggataacaatttcacacaggaaacagctatgaccatgattacgccaagcttgcatgcaggcctctgcagtcgacgggcccgggatcccttaagatttaatacgactcactataggggaattgtgagcggataacaattcccggcgcgccgacttcgagcgaaggagacttcgaatgaagttggataataacaaccatagcgtcttccttctgtactatcatttggtattagttgtcaagtatcgtcgccaggtgattgatgacacaatctcggattacgcgaaggatatgtttgtccgtttaggtaagaattacaacattagcctggtagagtggaatcatgacatggaccatgttcacatcttattcaaagctcaccccaactcggaattgtcgaagttcattaatgcgtacaagtctgcttcaagtcgccttattaagaagcattttcctcaagtaaagcgcaaattgtggaaggagtacttttggtcccgctcattttgcctgcttacaacaggaggagcgcctatcgaggtcatcaaaaaatacatcgaaaatcaggggatgaaatgataacctaggcttgctgcctgcgctgagcaataactagcataaccccttggggcctctaaacgggtcttgaggggttttttgctgaaacctcaggaagacttaacacgataggaagctggaatagtttcgaacgatggttattaatcctaataacggaacgctgtctggaggatgagtgtgacggagtgtaactctgccatacgttccggaaaaattccgttcgttcccgtaaccggcgcttcatcctatttcgcgcaggagactcccacttcaacgaccaaagggagtaagtgggagaggaatgcgcgttccccttttcttttgtgtatgatagaataaaggcgtggagaaaaccgtttaataaaggcactccaatcacggctactcgatgtatggagttggttacaggaaacgttgtaaccgtaaaacatcgagcgtagatccggttacctgatcggcacgtaagaggttccaactttcaccataatgaaataagatcactaccgggcgtattttttgagttatcgagattttcaggagctaaggaagctagttaacatggagaaaaaaatcactggatataccaccgttgatatatcccaatggcatcgtaaagaacattttgaggcatttcagtcagttgctcaatgtacctataaccagaccgttcagctggatattacggcctttttaaagaccgtaaagaaaaataagcacaagttttatccggcctttattcacattcttgcccgcctgatgaatgctcatccggagttccgtatggcaatgaaagacggtgagctggtgatatgggatagtgttcacccttgttacaccgttttccatgagcaaactgaaacgttttcatcgctctggagtgaataccacgacgatttccggcagtttctacacatatattcgcaagatgtggcgtgttacggtgaaaacctggcctatttccctaaagggtttattgagaatatgtttttcgtctcagccaatccctgggtgagtttcaccagttttgatttaaacgtggccaatatggacaacttcttcgcccccgttttcactatgggcaaatattatacgcaaggcgacaaggtgctgatgccgctggcgattcaggttcatcatgccgtttgtgatggcttccatgtcggcagaatgcttaatgaattacaacagtactgcgatgagtggcagggcggggcgtaacacgtggtctgttgtgtgtggaagccaagtactgccaacagacacaccgagagaatcggtaacgatgcaggcatgacctgcgtcgttgggtagttgtcaacctgccctgatacaaccccaagtcaaggaaggaggacgaagtccgcttgtacttctggggagttgcaagcccccacttcaagcgttagctaagtgggggtagttgacgagcgcaccgtttcaatgagatgcgccatgtccccgggaagcggagcggcaccggtgtctggcagctctaatcttttctagatgcattcgcgaggtaccgagctcgaattcactggccgtcgttttacaacgtcgtgactgggaaaaccctggcgttacccaacttaatcgccttgcagcacatccccctttcgccagctggcgtaatagcgaagaggcccgcaccgatcgcccttcccaacagttgcgcagcctgaatggcgaatggcgcctgatgcggtattttctccttacgcatctgtgcggtatttcacaccgcatatggtgcactctcagtacaatctgctctgatgccgcatagttaagccagccccgacacccgccaacacccgctgacgcgccctgacgggcttgtctgctcccggcatccgcttacagacaagctgtgaccgtctccgggagctgcatgtgtcagaggttttcaccgtcatcaccgaaacgcgcgagacgaaagggcctcgtgatacgcctatttttataggttaatgtcatgataat

SEQ ID NO: 125 - DNA, 4673 bp, synthetic construct
  source 1..4673: mol_type = other DNA
aatggtttcttagacgtcaggtggcacttttcggggaaatgtgcgcggaacccctatttgtttatttttctaaatacattcaaatatgtatccgctcatgagacaataaccctgataaatgcttcaataatattgaaaaaggaagagtatgagtattcaacatttccgtgtcgcccttattcccttttttgcggcattttgccttcctgtttttgctcacccagaaacgctggtgaaagtaaaagatgctgaagatcagttgggtgcacgagtgggttacatcgaactggatctcaacagcggtaagatccttgagagttttcgccccgaagaacgttttccaatgatgagcacttttaaagttctgctatgtggcgcggtattatcccgtattgacgccgggcaagagcaactcggtcgccgcatacactattctcagaatgacttggttgagtactcaccagtcacagaaaagcatcttacggatggcatgacagtaagagaattatgcagtgctgccataaccatgagtgataacactgcggccaacttacttctgacaacgatcggaggaccgaaggagctaaccgcttttttgcacaacatgggggatcatgtaactcgccttgatcgttgggaaccggagctgaatgaagccataccaaacgacgagcgtgacaccacgatgcctgtagcaatggcaacaacgttgcgcaaactattaactggcgaactacttactctagcttcccggcaacaattaatagactggatggaggcggataaagttgcaggaccacttctgcgctcggcccttccggctggctggtttattgctgataaatctggagccggtgagcgtgggtctcgcggtatcattgcagcactggggccagatggtaagccctcccgtatcgtagttatctacacgacggggagtcaggcaactatggatgaacgaaatagacagatcgctgagataggtgcctcactgattaagcattggtaactgtcagaccaagtttactcatatatactttagattgatttaaaacttcatttttaatttaaaaggatctaggtgaagatcctttttgataatctcatgaccaaaatcccttaacgtgagttttcgttccactgagcgtcagaccccgtagaaaagatcaaaggatcttcttgagatcctttttttctgcgcgtaatctgctgcttgcaaacaaaaaaaccaccgctaccagcggtggtttgtttgccggatcaagagctaccaactctttttccgaaggtaactggcttcagcagagcgcagataccaaatactgttcttctagtgtagccgtagttaggccaccacttcaagaactctgtagcaccgcctacatacctcgctctgctaatcctgttaccagtggctgctgccagtggcgataagtcgtgtcttaccgggttggactcaagacgatagttaccggataaggcgcagcggtcgggctgaacggggggttcgtgcacacagcccagcttggagcgaacgacctacaccgaactgagatacctacagcgtgagctatgagaaagcgccacgcttcccgaagggagaaaggcggacaggtatccggtaagcggcagggtcggaacaggagagcgcacgagggagcttccagggggaaacgcctggtatctttatagtcctgtcgggtttcgccacctctgacttgagcgtcgatttttgtgatgctcgtcaggggggcggagcctatggaaaaacgccagcaacgcggcctttttacggttcctggccttttgctggccttttgctcacatgttctttcctgcgttatcccctgattctgtggataaccgtattaccgcctttgagtgagctgataccgctcgccgcagccgaacgaccgagcgcagcgagtcagtgagcgaggaagcggaagagcgcccaatacgcaaaccgcctctccccgcgcgttggccgattcattaatgcagctggcacgacaggtttcccgactggaaagcgggcagtgagcgcaacgcaattaatgtgagttagctcactcattaggcaccccaggctttacactttatgcttccggctcgtatgttgtgtggaattgtgagcggataacaatttcacacaggaaacagctatgaccatgattacgccaagcttgcatgcaggcctctgcagtcgacgggcccgggatcccttaagatttaatacgactcactataggggaattgtgagcggataacaattcccggcgcgccgacttcgagcgaaggagacttcgaatgaagttggataataacaaccatagcgtcttccttctgtactatcatttggtattagttgtcaagtatcgtcgccaggtgattgatgacacaatctcggattacgcgaaggatatgtttgtccgtttaggtaagaattacaacattagcctggtagagtggaatcatgacatggaccatgttcacatcttattcaaagctcaccccaactcggaattgtcgaagttcattaatgcgtacaagtctgcttcaagtcgccttattaagaagcattttcctcaagtaaagcgcaaattgtggaaggagtacttttggtcccgctcattttgcctgcttacaacaggaggagcgcctatcgaggtcatcaaaaaatacatcgaaaatcaggggatgaaatgataacctaggcttgctgcctgcgctgagcaataactagcataaccccttggggcctctaaacgggtcttgaggggttttttgctgaaacctcaggaagacttaacacgataggaagctggaatagtttcgaacgatggttattaatcctaataacggaacgctgtctggaggatgagtgtgacggagtgtaactcaccttttcgtctatggccagctgatggtgtgttgaaacagtgtttttcatcttctttggcgaggagaccccgacttctaagcgagagcgaaagtcggggaggaatcgcccttcctcctttcaattaacaatgtactagcatgctcaactcggttacctgatcggcacgtaagaggttccaactttcaccataatgaaataagatcactaccgggcgtattttttgagttatcgagattttcaggagctaaggaagctagttaacatggagaaaaaaatcactggatataccaccgttgatatatcccaatggcatcgtaaagaacattttgaggcatttcagtcagttgctcaatgtacctataaccagaccgttcagctggatattacggcctttttaaagaccgtaaagaaaaataagcacaagttttatccggcctttattcacattcttgcccgcctgatgaatgctcatccggagttccgtatggcaatgaaagacggtgagctggtgatatgggatagtgttcacccttgttacaccgttttccatgagcaaactgaaacgttttcatcgctctggagtgaataccacgacgatttccggcagtttctacacatatattcgcaagatgtggcgtgttacggtgaaaacctggcctatttccctaaagggtttattgagaatatgtttttcgtctcagccaatccctgggtgagtttcaccagttttgatttaaacgtggccaatatggacaacttcttcgcccccgttttcactatgggcaaatattatacgcaaggcgacaaggtgctgatgccgctggcgattcaggttcatcatgccgtttgtgatggcttccatgtcggcagaatgcttaatgaattacaacagtactgcgatgagtggcagggcggggcgtaacacgtggagtggttttccatgcttattgataatgtacacgaacaagacgtgtacctcctttcaggagtgagttcctcctccccaatgttggaagggcttgttcggcagacagcaccgctcctacccatcagagcttttaaccatctgcgacagggttacggactggaggagcatccgtaagtgtcatgacccttccaacgtagccattgaatggctgagggtagtcaactagggcttgccaagcccccacttcaaaagccgttaggctttaagtggtggggagttgaccttccctacacacaagcgcccttgttgcaacggctccgcagcgcctcaataccggtgtctggcagctctaatcttttctagatgcattcgcgaggtaccgagctcgaattcactggccgtcgttttacaacgtcgtgactgggaaaaccctggcgttacccaacttaatcgccttgcagcacatccccctttcgccagctggcgtaatagcgaagaggcccgcaccgatcgcccttcccaacagttgcgcagcctgaatggcgaatggcgcctgatgcggtattttctccttacgcatctgtgcggtatttcacaccgcatatggtgcactctcagtacaatctgctctgatgccgcatagttaagccagccccgacacccgccaacacccgctgacgcgccctgacgggcttgtctgctcccggcatccgcttacagacaagctgtgaccgtctccgggagctgcatgtgtcagaggttttcaccgtcatcaccgaaacgcgcgagacgaaagggcctcgtgatacgcctatttttataggttaatgtcatgataat

SEQ ID NO: 126 - DNA, 4530 bp, synthetic construct
  source 1..4530: mol_type = other DNA
aatggtttcttagacgtcaggtggcacttttcggggaaatgtgcgcggaacccctatttgtttatttttctaaatacattcaaatatgtatccgctcatgagacaataaccctgataaatgcttcaataatattgaaaaaggaagagtatgagtattcaacatttccgtgtcgcccttattcccttttttgcggcattttgccttcctgtttttgctcacccagaaacgctggtgaaagtaaaagatgctgaagatcagttgggtgcacgagtgggttacatcgaactggatctcaacagcggtaagatccttgagagttttcgccccgaagaacgttttccaatgatgagcacttttaaagttctgctatgtggcgcggtattatcccgtattgacgccgggcaagagcaactcggtcgccgcatacactattctcagaatgacttggttgagtactcaccagtcacagaaaagcatcttacggatggcatgacagtaagagaattatgcagtgctgccataaccatgagtgataacactgcggccaacttacttctgacaacgatcggaggaccgaaggagctaaccgcttttttgcacaacatgggggatcatgtaactcgccttgatcgttgggaaccggagctgaatgaagccataccaaacgacgagcgtgacaccacgatgcctgtagcaatggcaacaacgttgcgcaaactattaactggcgaactacttactctagcttcccggcaacaattaatagactggatggaggcggataaagttgcaggaccacttctgcgctcggcccttccggctggctggtttattgctgataaatctggagccggtgagcgtgggtctcgcggtatcattgcagcactggggccagatggtaagccctcccgtatcgtagttatctacacgacggggagtcaggcaactatggatgaacgaaatagacagatcgctgagataggtgcctcactgattaagcattggtaactgtcagaccaagtttactcatatatactttagattgatttaaaacttcatttttaatttaaaaggatctaggtgaagatcctttttgataatctcatgaccaaaatcccttaacgtgagttttcgttccactgagcgtcagaccccgtagaaaagatcaaaggatcttcttgagatcctttttttctgcgcgtaatctgctgcttgcaaacaaaaaaaccaccgctaccagcggtggtttgtttgccggatcaagagctaccaactctttttccgaaggtaactggcttcagcagagcgcagataccaaatactgttcttctagtgtagccgtagttaggccaccacttcaagaactctgtagcaccgcctacatacctcgctctgctaatcctgttaccagtggctgctgccagtggcgataagtcgtgtcttaccgggttggactcaagacgatagttaccggataaggcgcagcggtcgggctgaacggggggttcgtgcacacagcccagcttggagcgaacgacctacaccgaactgagatacctacagcgtgagctatgagaaagcgccacgcttcccgaagggagaaaggcggacaggtatccggtaagcggcagggtcggaacaggagagcgcacgagggagcttccagggggaaacgcctggtatctttatagtcctgtcgggtttcgccacctctgacttgagcgtcgatttttgtgatgctcgtcaggggggcggagcctatggaaaaacgccagcaacgcggcctttttacggttcctggccttttgctggccttttgctcacatgttctttcctgcgttatcccctgattctgtggataaccgtattaccgcctttgagtgagctgataccgctcgccgcagccgaacgaccgagcgcagcgagtcagtgagcgaggaagcggaagagcgcccaatacgcaaaccgcctctccccgcgcgttggccgattcattaatgcagctggcacgacaggtttcccgactggaaagcgggcagtgagcgcaacgcaattaatgtgagttagctcactcattaggcaccccaggctttacactttatgcttccggctcgtatgttgtgtggaattgtgagcggataacaatttcacacaggaaacagctatgaccatgattacgccaagcttgcatgcaggcctctgcagtcgacgggcccgggatcccttaagatttaatacgactcactataggggaattgtgagcggataacaattcccggcgcgccgacttcgagcgaaggagacttcgaatgaagttggataataacaaccatagcgtcttccttctgtactatcatttggtattagttgtcaagtatcgtcgccaggtgattgatgacacaatctcggattacgcgaaggatatgtttgtccgtttaggtaagaattacaacattagcctggtagagtggaatcatgacatggaccatgttcacatcttattcaaagctcaccccaactcggaattgtcgaagttcattaatgcgtacaagtctgcttcaagtcgccttattaagaagcattttcctcaagtaaagcgcaaattgtggaaggagtacttttggtcccgctcattttgcctgcttacaacaggaggagcgcctatcgaggtcatcaaaaaagccatcgaaaatcaggggatgaaatgataacctaggcttgctgcctgcgctgagcaataactagcataaccccttggggcctctaaacgggtcttgaggggttttttgctgaaacctcaggaagacttaacacgataggaagctggaatagtttcgaacgatggttattaatcctaataacggaacgctgtctggaggatgagtgtgacggagtgtaactctcatccgtggattggcggagcgggcctcgtaaaaggctcgttttttttatcttaattaggcgagaagactcccacttcaacgaagcgaagcggagtaagtgggagatgaatcgccttaactatattttgctgaaaataggatagattcagtaaaatatagtatcatatagttagatgggaggtgaaaacggttacctgatcggcacgtaagaggttccaactttcaccataatgaaataagatcactaccgggcgtattttttgagttatcgagattttcaggagctaaggaagctagttaacatggagaaaaaaatcactggatataccaccgttgatatatcccaatggcatcgtaaagaacattttgaggcatttcagtcagttgctcaatgtacctataaccagaccgttcagctggatattacggcctttttaaagaccgtaaagaaaaataagcacaagttttatccggcctttattcacattcttgcccgcctgatgaatgctcatccggagttccgtatggcaatgaaagacggtgagctggtgatatgggatagtgttcacccttgttacaccgttttccatgagcaaactgaaacgttttcatcgctctggagtgaataccacgacgatttccggcagtttctacacatatattcgcaagatgtggcgtgttacggtgaaaacctggcctatttccctaaagggtttattgagaatatgtttttcgtctcagccaatccctgggtgagtttcaccagttttgatttaaacgtggccaatatggacaacttcttcgcccccgttttcactatgggcaaatattatacgcaaggcgacaaggtgctgatgccgctggcgattcaggttcatcatgccgtttgtgatggcttccatgtcggcagaatgcttaatgaattacaacagtactgcgatgagtggcagggcggggcgtaacacgtgcacgcctcaaagaataaggattgcttgaagcagtcaaacttctttggaagcccccacttcaaattttcgctagaaaattaagtgggggtagttcacggacaagtggttcaccatgcgttgctttatggtatgatagagcgtgaggtgaggaccggtgtctggcagctctaatcttttctagatgcattcgcgaggtaccgagctcgaattcactggccgtcgttttacaacgtcgtgactgggaaaaccctggcgttacccaacttaatcgccttgcagcacatccccctttcgccagctggcgtaatagcgaagaggcccgcaccgatcgcccttcccaacagttgcgcagcctgaatggcgaatggcgcctgatgcggtattttctccttacgcatctgtgcggtatttcacaccgcatatggtgcactctcagtacaatctgctctgatgccgcatagttaagccagccccgacacccgccaacacccgctgacgcgccctgacgggcttgtctgctcccggcatccgcttacagacaagctgtgaccgtctccgggagctgcatgtgtcagaggttttcaccgtcatcaccgaaacgcgcgagacgaaagggcctcgtgatacgcctatttttataggttaatgtcatgataat

SEQ ID NO: 127 - DNA, 4673 bp, synthetic construct
  source 1..4673: mol_type = other DNA
aatggtttcttagacgtcaggtggcacttttcggggaaatgtgcgcggaacccctatttgtttatttttctaaatacattcaaatatgtatccgctcatgagacaataaccctgataaatgcttcaataatattgaaaaaggaagagtatgagtattcaacatttccgtgtcgcccttattcccttttttgcggcattttgccttcctgtttttgctcacccagaaacgctggtgaaagtaaaagatgctgaagatcagttgggtgcacgagtgggttacatcgaactggatctcaacagcggtaagatccttgagagttttcgccccgaagaacgttttccaatgatgagcacttttaaagttctgctatgtggcgcggtattatcccgtattgacgccgggcaagagcaactcggtcgccgcatacactattctcagaatgacttggttgagtactcaccagtcacagaaaagcatcttacggatggcatgacagtaagagaattatgcagtgctgccataaccatgagtgataacactgcggccaacttacttctgacaacgatcggaggaccgaaggagctaaccgcttttttgcacaacatgggggatcatgtaactcgccttgatcgttgggaaccggagctgaatgaagccataccaaacgacgagcgtgacaccacgatgcctgtagcaatggcaacaacgttgcgcaaactattaactggcgaactacttactctagcttcccggcaacaattaatagactggatggaggcggataaagttgcaggaccacttctgcgctcggcccttccggctggctggtttattgctgataaatctggagccggtgagcgtgggtctcgcggtatcattgcagcactggggccagatggtaagccctcccgtatcgtagttatctacacgacggggagtcaggcaactatggatgaacgaaatagacagatcgctgagataggtgcctcactgattaagcattggtaactgtcagaccaagtttactcatatatactttagattgatttaaaacttcatttttaatttaaaaggatctaggtgaagatcctttttgataatctcatgaccaaaatcccttaacgtgagttttcgttccactgagcgtcagaccccgtagaaaagatcaaaggatcttcttgagatcctttttttctgcgcgtaatctgctgcttgcaaacaaaaaaaccaccgctaccagcggtggtttgtttgccggatcaagagctaccaactctttttccgaaggtaactggcttcagcagagcgcagataccaaatactgttcttctagtgtagccgtagttaggccaccacttcaagaactctgtagcaccgcctacatacctcgctctgctaatcctgttaccagtggctgctgccagtggcgataagtcgtgtcttaccgggttggactcaagacgatagttaccggataaggcgcagcggtcgggctgaacggggggttcgtgcacacagcccagcttggagcgaacgacctacaccgaactgagatacctacagcgtgagctatgagaaagcgccacgcttcccgaagggagaaaggcggacaggtatccggtaagcggcagggtcggaacaggagagcgcacgagggagcttccagggggaaacgcctggtatctttatagtcctgtcgggtttcgccacctctgacttgagcgtcgatttttgtgatgctcgtcaggggggcggagcctatggaaaaacgccagcaacgcggcctttttacggttcctggccttttgctggccttttgctcacatgttctttcctgcgttatcccctgattctgtggataaccgtattaccgcctttgagtgagctgataccgctcgccgcagccgaacgaccgagcgcagcgagtcagtgagcgaggaagcggaagagcgcccaatacgcaaaccgcctctccccgcgcgttggccgattcattaatgcagctggcacgacaggtttcccgactggaaagcgggcagtgagcgcaacgcaattaatgtgagttagctcactcattaggcaccccaggctttacactttatgcttccggctcgtatgttgtgtggaattgtgagcggataacaatttcacacaggaaacagctatgaccatgattacgccaagcttgcatgcaggcctctgcagtcgacgggcccgggatcccttaagatttaatacgactcactataggggaattgtgagcggataacaattcccggcgcgccgacttcgagcgaaggagacttcgaatgaagttggataataacaaccatagcgtcttccttctgtactatcatttggtattagttgtcaagtatcgtcgccaggtgattgatgacacaatctcggattacgcgaaggatatgtttgtccgtttaggtaagaattacaacattagcctggtagagtggaatcatgacatggaccatgttcacatcttattcaaagctcaccccaactcggaattgtcgaagttcattaatgcgtacaagtctgcttcaagtcgccttattaagaagcattttcctcaagtaaagcgcaaattgtggaaggagtacttttggtcccgctcattttgcctgcttacaacaggaggagcgcctatcgaggtcatcaaaaaatacatcgaaaatcaggggatgaaatgataacctaggcttgctgcctgcgctgagcaataactagcataaccccttggggcctctaaacgggtcttgaggggttttttgctgaaacctcaggaagacttaacacgataggaagctggaatagtttcgaacgatggttattaatcctaataacggaacgctgtctggaggatgagtgtgacggagtgtaactcattgaggcgctgcggagccgttgcaacaagggcgcttgtgtgtagggaaggtcaactccccaccacttaaagcctaacggcttttgaagtgggggcttggcaagccctagttgactaccctcagccattcaatggctacgttggaagggtcatgacacttacggatgctcctccagtccgtaaccctgtcgcagatggttaaaagctctgatgggtaggagcggtgctgtctgccgaacaagcccttccaacattggggaggaggaactcactcctgaaaggaggtacacgtcttgttcgtgtacattatcaataagcatggaaaaccactccacgtgttacgccccgccctgccactcatcgcagtactgttgtaattcattaagcattctgccgacatggaagccatcacaaacggcatgatgaacctgaatcgccagcggcatcagcaccttgtcgccttgcgtataatatttgcccatagtgaaaacgggggcgaagaagttgtccatattggccacgtttaaatcaaaactggtgaaactcacccagggattggctgagacgaaaaacatattctcaataaaccctttagggaaataggccaggttttcaccgtaacacgccacatcttgcgaatatatgtgtagaaactgccggaaatcgtcgtggtattcactccagagcgatgaaaacgtttcagtttgctcatggaaaacggtgtaacaagggtgaacactatcccatatcaccagctcaccgtctttcattgccatacggaactccggatgagcattcatcaggcgggcaagaatgtgaataaaggccggataaaacttgtgcttatttttctttacggtctttaaaaaggccgtaatatccagctgaacggtctggttataggtacattgagcaactgactgaaatgcctcaaaatgttctttacgatgccattgggatatatcaacggtggtatatccagtgatttttttctccatgttaactagcttccttagctcctgaaaatctcgataactcaaaaaatacgcccggtagtgatcttatttcattatggtgaaagttggaacctcttacgtgccgatcaggtaaccgagttgagcatgctagtacattgttaattgaaaggaggaagggcgattcctccccgactttcgctctcgcttagaagtcggggtctcctcgccaaagaagatgaaaaacactgtttcaacacaccatcagctggccatagacgaaaaggtaccggtgtctggcagctctaatcttttctagatgcattcgcgaggtaccgagctcgaattcactggccgtcgttttacaacgtcgtgactgggaaaaccctggcgttacccaacttaatcgccttgcagcacatccccctttcgccagctggcgtaatagcgaagaggcccgcaccgatcgcccttcccaacagttgcgcagcctgaatggcgaatggcgcctgatgcggtattttctccttacgcatctgtgcggtatttcacaccgcatatggtgcactctcagtacaatctgctctgatgccgcatagttaagccagccccgacacccgccaacacccgctgacgcgccctgacgggcttgtctgctcccggcatccgcttacagacaagctgtgaccgtctccgggagctgcatgtgtcagaggttttcaccgtcatcaccgaaacgcgcgagacgaaagggcctcgtgatacgcctatttttataggttaatgtcatgataat

SEQ ID NO: 128 - DNA, 4530 bp, synthetic construct
  source 1..4530: mol_type = other DNA
aatggtttcttagacgtcaggtggcacttttcggggaaatgtgcgcggaacccctatttgtttatttttctaaatacattcaaatatgtatccgctcatgagacaataaccctgataaatgcttcaataatattgaaaaaggaagagtatgagtattcaacatttccgtgtcgcccttattcccttttttgcggcattttgccttcctgtttttgctcacccagaaacgctggtgaaagtaaaagatgctgaagatcagttgggtgcacgagtgggttacatcgaactggatctcaacagcggtaagatccttgagagttttcgccccgaagaacgttttccaatgatgagcacttttaaagttctgctatgtggcgcggtattatcccgtattgacgccgggcaagagcaactcggtcgccgcatacactattctcagaatgacttggttgagtactcaccagtcacagaaaagcatcttacggatggcatgacagtaagagaattatgcagtgctgccataaccatgagtgataacactgcggccaacttacttctgacaacgatcggaggaccgaaggagctaaccgcttttttgcacaacatgggggatcatgtaactcgccttgatcgttgggaaccggagctgaatgaagccataccaaacgacgagcgtgacaccacgatgcctgtagcaatggcaacaacgttgcgcaaactattaactggcgaactacttactctagcttcccggcaacaattaatagactggatggaggcggataaagttgcaggaccacttctgcgctcggcccttccggctggctggtttattgctgataaatctggagccggtgagcgtgggtctcgcggtatcattgcagcactggggccagatggtaagccctcccgtatcgtagttatctacacgacggggagtcaggcaactatggatgaacgaaatagacagatcgctgagataggtgcctcactgattaagcattggtaactgtcagaccaagtttactcatatatactttagattgatttaaaacttcatttttaatttaaaaggatctaggtgaagatcctttttgataatctcatgaccaaaatcccttaacgtgagttttcgttccactgagcgtcagaccccgtagaaaagatcaaaggatcttcttgagatcctttttttctgcgcgtaatctgctgcttgcaaacaaaaaaaccaccgctaccagcggtggtttgtttgccggatcaagagctaccaactctttttccgaaggtaactggcttcagcagagcgcagataccaaatactgttcttctagtgtagccgtagttaggccaccacttcaagaactctgtagcaccgcctacatacctcgctctgctaatcctgttaccagtggctgctgccagtggcgataagtcgtgtcttaccgggttggactcaagacgatagttaccggataaggcgcagcggtcgggctgaacggggggttcgtgcacacagcccagcttggagcgaacgacctacaccgaactgagatacctacagcgtgagctatgagaaagcgccacgcttcccgaagggagaaaggcggacaggtatccggtaagcggcagggtcggaacaggagagcgcacgagggagcttccagggggaaacgcctggtatctttatagtcctgtcgggtttcgccacctctgacttgagcgtcgatttttgtgatgctcgtcaggggggcggagcctatggaaaaacgccagcaacgcggcctttttacggttcctggccttttgctggccttttgctcacatgttctttcctgcgttatcccctgattctgtggataaccgtattaccgcctttgagtgagctgataccgctcgccgcagccgaacgaccgagcgcagcgagtcagtgagcgaggaagcggaagagcgcccaatacgcaaaccgcctctccccgcgcgttggccgattcattaatgcagctggcacgacaggtttcccgactggaaagcgggcagtgagcgcaacgcaattaatgtgagttagctcactcattaggcaccccaggctttacactttatgcttccggctcgtatgttgtgtggaattgtgagcggataacaatttcacacaggaaacagctatgaccatgattacgccaagcttgcatgcaggcctctgcagtcgacgggcccgggatcccttaagatttaatacgactcactataggggaattgtgagcggataacaattcccggcgcgccgacttcgagcgaaggagacttcgaatgaagttggataataacaaccatagcgtcttccttctgtactatcatttggtattagttgtcaagtatcgtcgccaggtgattgatgacacaatctcggattacgcgaaggatatgtttgtccgtttaggtaagaattacaacattagcctggtagagtggaatcatgacatggaccatgttcacatcttattcaaagctcaccccaactcggaattgtcgaagttcattaatgcgtacaagtctgcttcaagtcgccttattaagaagcattttcctcaagtaaagcgcaaattgtggaaggagtacttttggtcccgctcattttgcctgcttacaacaggaggagcgcctatcgaggtcatcaaaaaatacatcgaaaatcaggggatgaaatgataacctaggcttgctgcctgcgctgagcaataactagcataaccccttggggcctctaaacgggtcttgaggggttttttgctgaaacctcaggaagacttaacacgataggaagctggaatagtttcgaacgatggttattaatcctaataacggaacgctgtctggaggatgagtgtgacggagtgtaactctcatccgtggattggcggagcgggcctcgtaaaaggctcgttttttttattttctattatcaagaaatttgtatcctacccccgtagtttaccagctcttttagtatcatggagcctatggttgaatgagtccaataacaaacttcgacatgataaaattcccccctcgcgacttccagagaagaagacggttacctgatcggcacgtaagaggttccaactttcaccataatgaaataagatcactaccgggcgtattttttgagttatcgagattttcaggagctaaggaagctagttaacatggagaaaaaaatcactggatataccaccgttgatatatcccaatggcatcgtaaagaacattttgaggcatttcagtcagttgctcaatgtacctataaccagaccgttcagctggatattacggcctttttaaagaccgtaaagaaaaataagcacaagttttatccggcctttattcacattcttgcccgcctgatgaatgctcatccggagttccgtatggcaatgaaagacggtgagctggtgatatgggatagtgttcacccttgttacaccgttttccatgagcaaactgaaacgttttcatcgctctggagtgaataccacgacgatttccggcagtttctacacatatattcgcaagatgtggcgtgttacggtgaaaacctggcctatttccctaaagggtttattgagaatatgtttttcgtctcagccaatccctgggtgagtttcaccagttttgatttaaacgtggccaatatggacaacttcttcgcccccgttttcactatgggcaaatattatacgcaaggcgacaaggtgctgatgccgctggcgattcaggttcatcatgccgtttgtgatggcttccatgtcggcagaatgcttaatgaattacaacagtactgcgatgagtggcagggcggggcgtaacacgtgcacgcctcaaagaataaggattgcttgaagcagtcaaacttctttggaagcccccacttcaaattttcgctagaaaattaagtgggggtagttcacggacaagtggttcaccatgcgttgctttatggtatgatagagcgtgaggtgaggaccggtgtctggcagctctaatcttttctagatgcattcgcgaggtaccgagctcgaattcactggccgtcgttttacaacgtcgtgactgggaaaaccctggcgttacccaacttaatcgccttgcagcacatccccctttcgccagctggcgtaatagcgaagaggcccgcaccgatcgcccttcccaacagttgcgcagcctgaatggcgaatggcgcctgatgcggtattttctccttacgcatctgtgcggtatttcacaccgcatatggtgcactctcagtacaatctgctctgatgccgcatagttaagccagccccgacacccgccaacacccgctgacgcgccctgacgggcttgtctgctcccggcatccgcttacagacaagctgtgaccgtctccgggagctgcatgtgtcagaggttttcaccgtcatcaccgaaacgcgcgagacgaaagggcctcgtgatacgcctatttttataggttaatgtcatgataat

SEQ ID NO: 129 - DNA, 4530 bp, synthetic construct
  source 1..4530: mol_type = other DNA
aatggtttcttagacgtcaggtggcacttttcggggaaatgtgcgcggaacccctatttgtttatttttctaaatacattcaaatatgtatccgctcatgagacaataaccctgataaatgcttcaataatattgaaaaaggaagagtatgagtattcaacatttccgtgtcgcccttattcccttttttgcggcattttgccttcctgtttttgctcacccagaaacgctggtgaaagtaaaagatgctgaagatcagttgggtgcacgagtgggttacatcgaactggatctcaacagcggtaagatccttgagagttttcgccccgaagaacgttttccaatgatgagcacttttaaagttctgctatgtggcgcggtattatcccgtattgacgccgggcaagagcaactcggtcgccgcatacactattctcagaatgacttggttgagtactcaccagtcacagaaaagcatcttacggatggcatgacagtaagagaattatgcagtgctgccataaccatgagtgataacactgcggccaacttacttctgacaacgatcggaggaccgaaggagctaaccgcttttttgcacaacatgggggatcatgtaactcgccttgatcgttgggaaccggagctgaatgaagccataccaaacgacgagcgtgacaccacgatgcctgtagcaatggcaacaacgttgcgcaaactattaactggcgaactacttactctagcttcccggcaacaattaatagactggatggaggcggataaagttgcaggaccacttctgcgctcggcccttccggctggctggtttattgctgataaatctggagccggtgagcgtgggtctcgcggtatcattgcagcactggggccagatggtaagccctcccgtatcgtagttatctacacgacggggagtcaggcaactatggatgaacgaaatagacagatcgctgagataggtgcctcactgattaagcattggtaactgtcagaccaagtttactcatatatactttagattgatttaaaacttcatttttaatttaaaaggatctaggtgaagatcctttttgataatctcatgaccaaaatcccttaacgtgagttttcgttccactgagcgtcagaccccgtagaaaagatcaaaggatcttcttgagatcctttttttctgcgcgtaatctgctgcttgcaaacaaaaaaaccaccgctaccagcggtggtttgtttgccggatcaagagctaccaactctttttccgaaggtaactggcttcagcagagcgcagataccaaatactgttcttctagtgtagccgtagttaggccaccacttcaagaactctgtagcaccgcctacatacctcgctctgctaatcctgttaccagtggctgctgccagtggcgataagtcgtgtcttaccgggttggactcaagacgatagttaccggataaggcgcagcggtcgggctgaacggggggttcgtgcacacagcccagcttggagcgaacgacctacaccgaactgagatacctacagcgtgagctatgagaaagcgccacgcttcccgaagggagaaaggcggacaggtatccggtaagcggcagggtcggaacaggagagcgcacgagggagcttccagggggaaacgcctggtatctttatagtcctgtcgggtttcgccacctctgacttgagcgtcgatttttgtgatgctcgtcaggggggcggagcctatggaaaaacgccagcaacgcggcctttttacggttcctggccttttgctggccttttgctcacatgttctttcctgcgttatcccctgattctgtggataaccgtattaccgcctttgagtgagctgataccgctcgccgcagccgaacgaccgagcgcagcgagtcagtgagcgaggaagcggaagagcgcccaatacgcaaaccgcctctccccgcgcgttggccgattcattaatgcagctggcacgacaggtttcccgactggaaagcgggcagtgagcgcaacgcaattaatgtgagttagctcactcattaggcaccccaggctttacactttatgcttccggctcgtatgttgtgtggaattgtgagcggataacaatttcacacaggaaacagctatgaccatgattacgccaagcttgcatgcaggcctctgcagtcgacgggcccgggatcccttaagatttaatacgactcactataggggaattgtgagcggataacaattcccggcgcgccgacttcgagcgaaggagacttcgaatgaagttggataataacaaccatagcgtcttccttctgtactatcatttggtattagttgtcaagtatcgtcgccaggtgattgatgacacaatctcggattacgcgaaggatatgtttgtccgtttaggtaagaattacaacattagcctggtagagtggaatcatgacatggaccatgttcacatcttattcaaagctcaccccaactcggaattgtcgaagttcattaatgcgtacaagtctgcttcaagtcgccttattaagaagcattttcctcaagtaaagcgcaaattgtggaaggagtacttttggtcccgctcattttgcctgcttacaacaggaggagcgcctatcgaggtcatcaaaaaatacatcgaaaatcaggggatgaaatgataacctaggcttgctgcctgcgctgagcaataactagcataaccccttggggcctctaaacgggtcttgaggggttttttgctgaaacctcaggaagacttaacacgataggaagctggaatagtttcgaacgatggttattaatcctaataacggaacgctgtctggaggatgagtgtgacggagtgtaactctcatccgtggattggcggagcgggcctcgtaaaaggctcgttttttttatcttaattaggcgagaagactcccacttcaacgaagcgaagcggagtaagtgggagatgaatcgccttaactatattttgctgaaaataggatagattcagtaaaatatagtatcatatagttagatgggaggtgaaaacggttacctgatcggcacgtaagaggttccaactttcaccataatgaaataagatcactaccgggcgtattttttgagttatcgagattttcaggagctaaggaagctagttaacatggagaaaaaaatcactggatataccaccgttgatatatcccaatggcatcgtaaagaacattttgaggcatttcagtcagttgctcaatgtacctataaccagaccgttcagctggatattacggcctttttaaagaccgtaaagaaaaataagcacaagttttatccggcctttattcacattcttgcccgcctgatgaatgctcatccggagttccgtatggcaatgaaagacggtgagctggtgatatgggatagtgttcacccttgttacaccgttttccatgagcaaactgaaacgttttcatcgctctggagtgaataccacgacgatttccggcagtttctacacatatattcgcaagatgtggcgtgttacggtgaaaacctggcctatttccctaaagggtttattgagaatatgtttttcgtctcagccaatccctgggtgagtttcaccagttttgatttaaacgtggccaatatggacaacttcttcgcccccgttttcactatgggcaaatattatacgcaaggcgacaaggtgctgatgccgctggcgattcaggttcatcatgccgtttgtgatggcttccatgtcggcagaatgcttaatgaattacaacagtactgcgatgagtggcagggcggggcgtaacacgtgttgtaacttattgttccgtgaaggccagagttacttcccggccctttccatgtgcgcaccataccctcctaattcttcggttatctttccgaagaaggagaagtggttcaccatgcgttgctttatggtatgatagagcgtgaggtgaggaccggtgtctggcagctctaatcttttctagatgcattcgcgaggtaccgagctcgaattcactggccgtcgttttacaacgtcgtgactgggaaaaccctggcgttacccaacttaatcgccttgcagcacatccccctttcgccagctggcgtaatagcgaagaggcccgcaccgatcgcccttcccaacagttgcgcagcctgaatggcgaatggcgcctgatgcggtattttctccttacgcatctgtgcggtatttcacaccgcatatggtgcactctcagtacaatctgctctgatgccgcatagttaagccagccccgacacccgccaacacccgctgacgcgccctgacgggcttgtctgctcccggcatccgcttacagacaagctgtgaccgtctccgggagctgcatgtgtcagaggttttcaccgtcatcaccgaaacgcgcgagacgaaagggcctcgtgatacgcctatttttataggttaatgtcatgataat

SEQ ID NO: 130 - DNA, 4530 bp, synthetic construct
  source 1..4530: mol_type = other DNA
aatggtttcttagacgtcaggtggcacttttcggggaaatgtgcgcggaacccctatttgtttatttttctaaatacattcaaatatgtatccgctcatgagacaataaccctgataaatgcttcaataatattgaaaaaggaagagtatgagtattcaacatttccgtgtcgcccttattcccttttttgcggcattttgccttcctgtttttgctcacccagaaacgctggtgaaagtaaaagatgctgaagatcagttgggtgcacgagtgggttacatcgaactggatctcaacagcggtaagatccttgagagttttcgccccgaagaacgttttccaatgatgagcacttttaaagttctgctatgtggcgcggtattatcccgtattgacgccgggcaagagcaactcggtcgccgcatacactattctcagaatgacttggttgagtactcaccagtcacagaaaagcatcttacggatggcatgacagtaagagaattatgcagtgctgccataaccatgagtgataacactgcggccaacttacttctgacaacgatcggaggaccgaaggagctaaccgcttttttgcacaacatgggggatcatgtaactcgccttgatcgttgggaaccggagctgaatgaagccataccaaacgacgagcgtgacaccacgatgcctgtagcaatggcaacaacgttgcgcaaactattaactggcgaactacttactctagcttcccggcaacaattaatagactggatggaggcggataaagttgcaggaccacttctgcgctcggcccttccggctggctggtttattgctgataaatctggagccggtgagcgtgggtctcgcggtatcattgcagcactggggccagatggtaagccctcccgtatcgtagttatctacacgacggggagtcaggcaactatggatgaacgaaatagacagatcgctgagataggtgcctcactgattaagcattggtaactgtcagaccaagtttactcatatatactttagattgatttaaaacttcatttttaatttaaaaggatctaggtgaagatcctttttgataatctcatgaccaaaatcccttaacgtgagttttcgttccactgagcgtcagaccccgtagaaaagatcaaaggatcttcttgagatcctttttttctgcgcgtaatctgctgcttgcaaacaaaaaaaccaccgctaccagcggtggtttgtttgccggatcaagagctaccaactctttttccgaaggtaactggcttcagcagagcgcagataccaaatactgttcttctagtgtagccgtagttaggccaccacttcaagaactctgtagcaccgcctacatacctcgctctgctaatcctgttaccagtggctgctgccagtggcgataagtcgtgtcttaccgggttggactcaagacgatagttaccggataaggcgcagcggtcgggctgaacggggggttcgtgcacacagcccagcttggagcgaacgacctacaccgaactgagatacctacagcgtgagctatgagaaagcgccacgcttcccgaagggagaaaggcggacaggtatccggtaagcggcagggtcggaacaggagagcgcacgagggagcttccagggggaaacgcctggtatctttatagtcctgtcgggtttcgccacctctgacttgagcgtcgatttttgtgatgctcgtcaggggggcggagcctatggaaaaacgccagcaacgcggcctttttacggttcctggccttttgctggccttttgctcacatgttctttcctgcgttatcccctgattctgtggataaccgtattaccgcctttgagtgagctgataccgctcgccgcagccgaacgaccgagcgcagcgagtcagtgagcgaggaagcggaagagcgcccaatacgcaaaccgcctctccccgcgcgttggccgattcattaatgcagctggcacgacaggtttcccgactggaaagcgggcagtgagcgcaacgcaattaatgtgagttagctcactcattaggcaccccaggctttacactttatgcttccggctcgtatgttgtgtggaattgtgagcggataacaatttcacacaggaaacagctatgaccatgattacgccaagcttgcatgcaggcctctgcagtcgacgggcccgggatcccttaagatttaatacgactcactataggggaattgtgagcggataacaattcccggcgcgccgacttcgagcgaaggagacttcgaatgaagttggataataacaaccatagcgtcttccttctgtactatcatttggtattagttgtcaagtatcgtcgccaggtgattgatgacacaatctcggattacgcgaaggatatgtttgtccgtttaggtaagaattacaacattagcctggtagagtggaatcatgacatggaccatgttcacatcttattcaaagctcaccccaactcggaattgtcgaagttcattaatgcgtacaagtctgcttcaagtcgccttattaagaagcattttcctcaagtaaagcgcaaattgtggaaggagtacttttggtcccgctcattttgcctgcttacaacaggaggagcgcctatcgaggtcatcaaaaaatacatcgaaaatcaggggatgaaatgataacctaggcttgctgcctgcgctgagcaataactagcataaccccttggggcctctaaacgggtcttgaggggttttttgctgaaacctcaggaagacttaacacgataggaagctggaatagtttcgaacgatggttattaatcctaataacggaacgctgtctggaggatgagtgtgacggagtgtaactctcatccgtggattggcggagcgggcctcgtaaaaggctcgtttttgggcgcttaattaggcgagaagactcccacttcaacgaagcgaagcggagtaagtgggagatgaatcgccttaactatattttgctgaaaataggatagattcagtaaaatatagtatcatatagttagatgggaggtgaaaacggttacctgatcggcacgtaagaggttccaactttcaccataatgaaataagatcactaccgggcgtattttttgagttatcgagattttcaggagctaaggaagctagttaacatggagaaaaaaatcactggatataccaccgttgatatatcccaatggcatcgtaaagaacattttgaggcatttcagtcagttgctcaatgtacctataaccagaccgttcagctggatattacggcctttttaaagaccgtaaagaaaaataagcacaagttttatccggcctttattcacattcttgcccgcctgatgaatgctcatccggagttccgtatggcaatgaaagacggtgagctggtgatatgggatagtgttcacccttgttacaccgttttccatgagcaaactgaaacgttttcatcgctctggagtgaataccacgacgatttccggcagtttctacacatatattcgcaagatgtggcgtgttacggtgaaaacctggcctatttccctaaagggtttattgagaatatgtttttcgtctcagccaatccctgggtgagtttcaccagttttgatttaaacgtggccaatatggacaacttcttcgcccccgttttcactatgggcaaatattatacgcaaggcgacaaggtgctgatgccgctggcgattcaggttcatcatgccgtttgtgatggcttccatgtcggcagaatgcttaatgaattacaacagtactgcgatgagtggcagggcggggcgtaacacgtgcacgcctcaaagaataaggattgcttgaagcagtcaaacttctttggaagcccccacttcaaattttcgctagaaaattaagtgggggtagttcacggacaagtggttcaccatgcgttgctttatggtatgatagagcgtgaggtgaggaccggtgtctggcagctctaatcttttctagatgcattcgcgaggtaccgagctcgaattcactggccgtcgttttacaacgtcgtgactgggaaaaccctggcgttacccaacttaatcgccttgcagcacatccccctttcgccagctggcgtaatagcgaagaggcccgcaccgatcgcccttcccaacagttgcgcagcctgaatggcgaatggcgcctgatgcggtattttctccttacgcatctgtgcggtatttcacaccgcatatggtgcactctcagtacaatctgctctgatgccgcatagttaagccagccccgacacccgccaacacccgctgacgcgccctgacgggcttgtctgctcccggcatccgcttacagacaagctgtgaccgtctccgggagctgcatgtgtcagaggttttcaccgtcatcaccgaaacgcgcgagacgaaagggcctcgtgatacgcctatttttataggttaatgtcatgataat

SEQ ID NO: 131 - DNA, 4530 bp, synthetic construct
  source 1..4530: mol_type = other DNA
aatggtttcttagacgtcaggtggcacttttcggggaaatgtgcgcggaacccctatttgtttatttttctaaatacattcaaatatgtatccgctcatgagacaataaccctgataaatgcttcaataatattgaaaaaggaagagtatgagtattcaacatttccgtgtcgcccttattcccttttttgcggcattttgccttcctgtttttgctcacccagaaacgctggtgaaagtaaaagatgctgaagatcagttgggtgcacgagtgggttacatcgaactggatctcaacagcggtaagatccttgagagttttcgccccgaagaacgttttccaatgatgagcacttttaaagttctgctatgtggcgcggtattatcccgtattgacgccgggcaagagcaactcggtcgccgcatacactattctcagaatgacttggttgagtactcaccagtcacagaaaagcatcttacggatggcatgacagtaagagaattatgcagtgctgccataaccatgagtgataacactgcggccaacttacttctgacaacgatcggaggaccgaaggagctaaccgcttttttgcacaacatgggggatcatgtaactcgccttgatcgttgggaaccggagctgaatgaagccataccaaacgacgagcgtgacaccacgatgcctgtagcaatggcaacaacgttgcgcaaactattaactggcgaactacttactctagcttcccggcaacaattaatagactggatggaggcggataaagttgcaggaccacttctgcgctcggcccttccggctggctggtttattgctgataaatctggagccggtgagcgtgggtctcgcggtatcattgcagcactggggccagatggtaagccctcccgtatcgtagttatctacacgacggggagtcaggcaactatggatgaacgaaatagacagatcgctgagataggtgcctcactgattaagcattggtaactgtcagaccaagtttactcatatatactttagattgatttaaaacttcatttttaatttaaaaggatctaggtgaagatcctttttgataatctcatgaccaaaatcccttaacgtgagttttcgttccactgagcgtcagaccccgtagaaaagatcaaaggatcttcttgagatcctttttttctgcgcgtaatctgctgcttgcaaacaaaaaaaccaccgctaccagcggtggtttgtttgccggatcaagagctaccaactctttttccgaaggtaactggcttcagcagagcgcagataccaaatactgttcttctagtgtagccgtagttaggccaccacttcaagaactctgtagcaccgcctacatacctcgctctgctaatcctgttaccagtggctgctgccagtggcgataagtcgtgtcttaccgggttggactcaagacgatagttaccggataaggcgcagcggtcgggctgaacggggggttcgtgcacacagcccagcttggagcgaacgacctacaccgaactgagatacctacagcgtgagctatgagaaagcgccacgcttcccgaagggagaaaggcggacaggtatccggtaagcggcagggtcggaacaggagagcgcacgagggagcttccagggggaaacgcctggtatctttatagtcctgtcgggtttcgccacctctgacttgagcgtcgatttttgtgatgctcgtcaggggggcggagcctatggaaaaacgccagcaacgcggcctttttacggttcctggccttttgctggccttttgctcacatgttctttcctgcgttatcccctgattctgtggataaccgtattaccgcctttgagtgagctgataccgctcgccgcagccgaacgaccgagcgcagcgagtcagtgagcgaggaagcggaagagcgcccaatacgcaaaccgcctctccccgcgcgttggccgattcattaatgcagctggcacgacaggtttcccgactggaaagcgggcagtgagcgcaacgcaattaatgtgagttagctcactcattaggcaccccaggctttacactttatgcttccggctcgtatgttgtgtggaattgtgagcggataacaatttcacacaggaaacagctatgaccatgattacgccaagcttgcatgcaggcctctgcagtcgacgggcccgggatcccttaagatttaatacgactcactataggggaattgtgagcggataacaattcccggcgcgccgacttcgagcgaaggagacttcgaatgaagttggataataacaaccatagcgtcttccttctgtactatcatttggtattagttgtcaagtatcgtcgccaggtgattgatgacacaatctcggattacgcgaaggatatgtttgtccgtttaggtaagaattacaacattagcctggtagagtggaatcatgacatggaccatgttcacatcttattcaaagctcaccccaactcggaattgtcgaagttcattaatgcgtacaagtctgcttcaagtcgccttattaagaagcattttcctcaagtaaagcgcaaattgtggaaggagtacttttggtcccgctcattttgcctgcttacaacaggaggagcgcctatcgaggtcatcaaaaaatacatcgaaaatcaggggatgaaatgataacctaggcttgctgcctgcgctgagcaataactagcataaccccttggggcctctaaacgggtcttgaggggttttttgctgaaacctcaggaagacttaacacgataggaagctggaatagtttcgaacgatggttattaatcctaataacggaacgctgtctggaggatgagtgtgacggagtgtaactctcatccgtggattggcggagcgggcctcgtaaaaggctcgttttttttaccttaattaggcgagaagactcccacttcaacgaagcgaagcggagtaagtgggagatgaatcgccttaactatattttgctgaaaataggatagattcagtaaaatatagtatcatatagttagatgggaggtgaaaacggttacctgatcggcacgtaagaggttccaactttcaccataatgaaataagatcactaccgggcgtattttttgagttatcgagattttcaggagctaaggaagctagttaacatggagaaaaaaatcactggatataccaccgttgatatatcccaatggcatcgtaaagaacattttgaggcatttcagtcagttgctcaatgtacctataaccagaccgttcagctggatattacggcctttttaaagaccgtaaagaaaaataagcacaagttttatccggcctttattcacattcttgcccgcctgatgaatgctcatccggagttccgtatggcaatgaaagacggtgagctggtgatatgggatagtgttcacccttgttacaccgttttccatgagcaaactgaaacgttttcatcgctctggagtgaataccacgacgatttccggcagtttctacacatatattcgcaagatgtggcgtgttacggtgaaaacctggcctatttccctaaagggtttattgagaatatgtttttcgtctcagccaatccctgggtgagtttcaccagttttgatttaaacgtggccaatatggacaacttcttcgcccccgttttcactatgggcaaatattatacgcaaggcgacaaggtgctgatgccgctggcgattcaggttcatcatgccgtttgtgatggcttccatgtcggcagaatgcttaatgaattacaacagtactgcgatgagtggcagggcggggcgtaacacgtgcacgcctcaaagaataaggattgcttgaagcagtcaaacttctttggaagcccccacttcaaattttcgctagaaaattaagtgggggtagttcacggacaagtggttcaccatgcgttgctttatggtatgatagagcgtgaggtgaggaccggtgtctggcagctctaatcttttctagatgcattcgcgaggtaccgagctcgaattcactggccgtcgttttacaacgtcgtgactgggaaaaccctggcgttacccaacttaatcgccttgcagcacatccccctttcgccagctggcgtaatagcgaagaggcccgcaccgatcgcccttcccaacagttgcgcagcctgaatggcgaatggcgcctgatgcggtattttctccttacgcatctgtgcggtatttcacaccgcatatggtgcactctcagtacaatctgctctgatgccgcatagttaagccagccccgacacccgccaacacccgctgacgcgccctgacgggcttgtctgctcccggcatccgcttacagacaagctgtgaccgtctccgggagctgcatgtgtcagaggttttcaccgtcatcaccgaaacgcgcgagacgaaagggcctcgtgatacgcctatttttataggttaatgtcatgataat

SEQ ID NO: 132 - DNA, 4530 bp, synthetic construct
  source 1..4530: mol_type = other DNA
aatggtttcttagacgtcaggtggcacttttcggggaaatgtgcgcggaacccctatttgtttatttttctaaatacattcaaatatgtatccgctcatgagacaataaccctgataaatgcttcaataatattgaaaaaggaagagtatgagtattcaacatttccgtgtcgcccttattcccttttttgcggcattttgccttcctgtttttgctcacccagaaacgctggtgaaagtaaaagatgctgaagatcagttgggtgcacgagtgggttacatcgaactggatctcaacagcggtaagatccttgagagttttcgccccgaagaacgttttccaatgatgagcacttttaaagttctgctatgtggcgcggtattatcccgtattgacgccgggcaagagcaactcggtcgccgcatacactattctcagaatgacttggttgagtactcaccagtcacagaaaagcatcttacggatggcatgacagtaagagaattatgcagtgctgccataaccatgagtgataacactgcggccaacttacttctgacaacgatcggaggaccgaaggagctaaccgcttttttgcacaacatgggggatcatgtaactcgccttgatcgttgggaaccggagctgaatgaagccataccaaacgacgagcgtgacaccacgatgcctgtagcaatggcaacaacgttgcgcaaactattaactggcgaactacttactctagcttcccggcaacaattaatagactggatggaggcggataaagttgcaggaccacttctgcgctcggcccttccggctggctggtttattgctgataaatctggagccggtgagcgtgggtctcgcggtatcattgcagcactggggccagatggtaagccctcccgtatcgtagttatctacacgacggggagtcaggcaactatggatgaacgaaatagacagatcgctgagataggtgcctcactgattaagcattggtaactgtcagaccaagtttactcatatatactttagattgatttaaaacttcatttttaatttaaaaggatctaggtgaagatcctttttgataatctcatgaccaaaatcccttaacgtgagttttcgttccactgagcgtcagaccccgtagaaaagatcaaaggatcttcttgagatcctttttttctgcgcgtaatctgctgcttgcaaacaaaaaaaccaccgctaccagcggtggtttgtttgccggatcaagagctaccaactctttttccgaaggtaactggcttcagcagagcgcagataccaaatactgttcttctagtgtagccgtagttaggccaccacttcaagaactctgtagcaccgcctacatacctcgctctgctaatcctgttaccagtggctgctgccagtggcgataagtcgtgtcttaccgggttggactcaagacgatagttaccggataaggcgcagcggtcgggctgaacggggggttcgtgcacacagcccagcttggagcgaacgacctacaccgaactgagatacctacagcgtgagctatgagaaagcgccacgcttcccgaagggagaaaggcggacaggtatccggtaagcggcagggtcggaacaggagagcgcacgagggagcttccagggggaaacgcctggtatctttatagtcctgtcgggtttcgccacctctgacttgagcgtcgatttttgtgatgctcgtcaggggggcggagcctatggaaaaacgccagcaacgcggcctttttacggttcctggccttttgctggccttttgctcacatgttctttcctgcgttatcccctgattctgtggataaccgtattaccgcctttgagtgagctgataccgctcgccgcagccgaacgaccgagcgcagcgagtcagtgagcgaggaagcggaagagcgcccaatacgcaaaccgcctctccccgcgcgttggccgattcattaatgcagctggcacgacaggtttcccgactggaaagcgggcagtgagcgcaacgcaattaatgtgagttagctcactcattaggcaccccaggctttacactttatgcttccggctcgtatgttgtgtggaattgtgagcggataacaatttcacacaggaaacagctatgaccatgattacgccaagcttgcatgcaggcctctgcagtcgacgggcccgggatcccttaagatttaatacgactcactataggggaattgtgagcggataacaattcccggcgcgccgacttcgagcgaaggagacttcgaatgaagttggataataacaaccatagcgtcttccttctgtactatcatttggtattagttgtcaagtatcgtcgccaggtgattgatgacacaatctcggattacgcgaaggatatgtttgtccgtttaggtaagaattacaacattagcctggtagagtggaatcatgacatggaccatgttcacatcttattcaaagctcaccccaactcggaattgtcgaagttcattaatgcgtacaagtctgcttcaagtcgccttattaagaagcattttcctcaagtaaagcgcaaattgtggaaggagtacttttggtcccgctcattttgcctgcttacaacaggaggagcgcctatcgaggtcatcaaaaaatacatcgaaaatcaggggatgaaatgataacctaggcttgctgcctgcgctgagcaataactagcataaccccttggggcctctaaacgggtcttgaggggttttttgctgaaacctcaggaagacttaacacgataggaagctggaatagtttcgaacgatggttattaatcctaataacggaacgctgtctggaggatgagtgtgacggagtgtaactctcatccgtggattggcggagcgggcctcgtaaaaggctcgttttttttatcttaattaggcgagaaagctcccacttcaacgaagcgaagcggagtaagtgggagatgaatcgccttaactatattttgctgaaaataggatagattcagtaaaatatagtatcatatagttagatgggaggtgaaaacggttacctgatcggcacgtaagaggttccaactttcaccataatgaaataagatcactaccgggcgtattttttgagttatcgagattttcaggagctaaggaagctagttaacatggagaaaaaaatcactggatataccaccgttgatatatcccaatggcatcgtaaagaacattttgaggcatttcagtcagttgctcaatgtacctataaccagaccgttcagctggatattacggcctttttaaagaccgtaaagaaaaataagcacaagttttatccggcctttattcacattcttgcccgcctgatgaatgctcatccggagttccgtatggcaatgaaagacggtgagctggtgatatgggatagtgttcacccttgttacaccgttttccatgagcaaactgaaacgttttcatcgctctggagtgaataccacgacgatttccggcagtttctacacatatattcgcaagatgtggcgtgttacggtgaaaacctggcctatttccctaaagggtttattgagaatatgtttttcgtctcagccaatccctgggtgagtttcaccagttttgatttaaacgtggccaatatggacaacttcttcgcccccgttttcactatgggcaaatattatacgcaaggcgacaaggtgctgatgccgctggcgattcaggttcatcatgccgtttgtgatggcttccatgtcggcagaatgcttaatgaattacaacagtactgcgatgagtggcagggcggggcgtaacacgtgcacgcctcaaagaataaggattgcttgaagcagtcaaacttctttggaagcccccacttcaaattttcgctagaaaattaagtgggggtagttcacggacaagtggttcaccatgcgttgctttatggtatgatagagcgtgaggtgaggaccggtgtctggcagctctaatcttttctagatgcattcgcgaggtaccgagctcgaattcactggccgtcgttttacaacgtcgtgactgggaaaaccctggcgttacccaacttaatcgccttgcagcacatccccctttcgccagctggcgtaatagcgaagaggcccgcaccgatcgcccttcccaacagttgcgcagcctgaatggcgaatggcgcctgatgcggtattttctccttacgcatctgtgcggtatttcacaccgcatatggtgcactctcagtacaatctgctctgatgccgcatagttaagccagccccgacacccgccaacacccgctgacgcgccctgacgggcttgtctgctcccggcatccgcttacagacaagctgtgaccgtctccgggagctgcatgtgtcagaggttttcaccgtcatcaccgaaacgcgcgagacgaaagggcctcgtgatacgcctatttttataggttaatgtcatgataat

SEQ ID NO: 133 - DNA, 4530 bp, synthetic construct
  source 1..4530: mol_type = other DNA
aatggtttcttagacgtcaggtggcacttttcggggaaatgtgcgcggaacccctatttgtttatttttctaaatacattcaaatatgtatccgctcatgagacaataaccctgataaatgcttcaataatattgaaaaaggaagagtatgagtattcaacatttccgtgtcgcccttattcccttttttgcggcattttgccttcctgtttttgctcacccagaaacgctggtgaaagtaaaagatgctgaagatcagttgggtgcacgagtgggttacatcgaactggatctcaacagcggtaagatccttgagagttttcgccccgaagaacgttttccaatgatgagcacttttaaagttctgctatgtggcgcggtattatcccgtattgacgccgggcaagagcaactcggtcgccgcatacactattctcagaatgacttggttgagtactcaccagtcacagaaaagcatcttacggatggcatgacagtaagagaattatgcagtgctgccataaccatgagtgataacactgcggccaacttacttctgacaacgatcggaggaccgaaggagctaaccgcttttttgcacaacatgggggatcatgtaactcgccttgatcgttgggaaccggagctgaatgaagccataccaaacgacgagcgtgacaccacgatgcctgtagcaatggcaacaacgttgcgcaaactattaactggcgaactacttactctagcttcccggcaacaattaatagactggatggaggcggataaagttgcaggaccacttctgcgctcggcccttccggctggctggtttattgctgataaatctggagccggtgagcgtgggtctcgcggtatcattgcagcactggggccagatggtaagccctcccgtatcgtagttatctacacgacggggagtcaggcaactatggatgaacgaaatagacagatcgctgagataggtgcctcactgattaagcattggtaactgtcagaccaagtttactcatatatactttagattgatttaaaacttcatttttaatttaaaaggatctaggtgaagatcctttttgataatctcatgaccaaaatcccttaacgtgagttttcgttccactgagcgtcagaccccgtagaaaagatcaaaggatcttcttgagatcctttttttctgcgcgtaatctgctgcttgcaaacaaaaaaaccaccgctaccagcggtggtttgtttgccggatcaagagctaccaactctttttccgaaggtaactggcttcagcagagcgcagataccaaatactgttcttctagtgtagccgtagttaggccaccacttcaagaactctgtagcaccgcctacatacctcgctctgctaatcctgttaccagtggctgctgccagtggcgataagtcgtgtcttaccgggttggactcaagacgatagttaccggataaggcgcagcggtcgggctgaacggggggttcgtgcacacagcccagcttggagcgaacgacctacaccgaactgagatacctacagcgtgagctatgagaaagcgccacgcttcccgaagggagaaaggcggacaggtatccggtaagcggcagggtcggaacaggagagcgcacgagggagcttccagggggaaacgcctggtatctttatagtcctgtcgggtttcgccacctctgacttgagcgtcgatttttgtgatgctcgtcaggggggcggagcctatggaaaaacgccagcaacgcggcctttttacggttcctggccttttgctggccttttgctcacatgttctttcctgcgttatcccctgattctgtggataaccgtattaccgcctttgagtgagctgataccgctcgccgcagccgaacgaccgagcgcagcgagtcagtgagcgaggaagcggaagagcgcccaatacgcaaaccgcctctccccgcgcgttggccgattcattaatgcagctggcacgacaggtttcccgactggaaagcgggcagtgagcgcaacgcaattaatgtgagttagctcactcattaggcaccccaggctttacactttatgcttccggctcgtatgttgtgtggaattgtgagcggataacaatttcacacaggaaacagctatgaccatgattacgccaagcttgcatgcaggcctctgcagtcgacgggcccgggatcccttaagatttaatacgactcactataggggaattgtgagcggataacaattcccggcgcgccgacttcgagcgaaggagacttcgaatgaagttggataataacaaccatagcgtcttccttctgtactatcatttggtattagttgtcaagtatcgtcgccaggtgattgatgacacaatctcggattacgcgaaggatatgtttgtccgtttaggtaagaattacaacattagcctggtagagtggaatcatgacatggaccatgttcacatcttattcaaagctcaccccaactcggaattgtcgaagttcattaatgcgtacaagtctgcttcaagtcgccttattaagaagcattttcctcaagtaaagcgcaaattgtggaaggagtacttttggtcccgctcattttgcctgcttacaacaggaggagcgcctatcgaggtcatcaaaaaatacatcgaaaatcaggggatgaaatgataacctaggcttgctgcctgcgctgagcaataactagcataaccccttggggcctctaaacgggtcttgaggggttttttgctgaaacctcaggaagacttaacacgataggaagctggaatagtttcgaacgatggttattaatcctaataacggaacgctgtctggaggatgagtgtgacggagtgtaactctcatccgtggattggcggagcgggcctcgtaaaaggctcgttttttttaccttaattaggcgagaaagctcccacttcaacgaagcgaagcggagtaagtgggagatgaatcgccttaactatattttgctgaaaataggatagattcagtaaaatatagtatcatatagttagatgggaggtgaaaacggttacctgatcggcacgtaagaggttccaactttcaccataatgaaataagatcactaccgggcgtattttttgagttatcgagattttcaggagctaaggaagctagttaacatggagaaaaaaatcactggatataccaccgttgatatatcccaatggcatcgtaaagaacattttgaggcatttcagtcagttgctcaatgtacctataaccagaccgttcagctggatattacggcctttttaaagaccgtaaagaaaaataagcacaagttttatccggcctttattcacattcttgcccgcctgatgaatgctcatccggagttccgtatggcaatgaaagacggtgagctggtgatatgggatagtgttcacccttgttacaccgttttccatgagcaaactgaaacgttttcatcgctctggagtgaataccacgacgatttccggcagtttctacacatatattcgcaagatgtggcgtgttacggtgaaaacctggcctatttccctaaagggtttattgagaatatgtttttcgtctcagccaatccctgggtgagtttcaccagttttgatttaaacgtggccaatatggacaacttcttcgcccccgttttcactatgggcaaatattatacgcaaggcgacaaggtgctgatgccgctggcgattcaggttcatcatgccgtttgtgatggcttccatgtcggcagaatgcttaatgaattacaacagtactgcgatgagtggcagggcggggcgtaacacgtgcacgcctcaaagaataaggattgcttgaagcagtcaaacttctttggaagcccccacttcaaattttcgctagaaaattaagtgggggtagttcacggacaagtggttcaccatgcgttgctttatggtatgatagagcgtgaggtgaggaccggtgtctggcagctctaatcttttctagatgcattcgcgaggtaccgagctcgaattcactggccgtcgttttacaacgtcgtgactgggaaaaccctggcgttacccaacttaatcgccttgcagcacatccccctttcgccagctggcgtaatagcgaagaggcccgcaccgatcgcccttcccaacagttgcgcagcctgaatggcgaatggcgcctgatgcggtattttctccttacgcatctgtgcggtatttcacaccgcatatggtgcactctcagtacaatctgctctgatgccgcatagttaagccagccccgacacccgccaacacccgctgacgcgccctgacgggcttgtctgctcccggcatccgcttacagacaagctgtgaccgtctccgggagctgcatgtgtcagaggttttcaccgtcatcaccgaaacgcgcgagacgaaagggcctcgtgatacgcctatttttataggttaatgtcatgataat

SEQ ID NO: 134 - DNA, 4530 bp, synthetic construct
  source 1..4530: mol_type = other DNA
aatggtttcttagacgtcaggtggcacttttcggggaaatgtgcgcggaacccctatttgtttatttttctaaatacattcaaatatgtatccgctcatgagacaataaccctgataaatgcttcaataatattgaaaaaggaagagtatgagtattcaacatttccgtgtcgcccttattcccttttttgcggcattttgccttcctgtttttgctcacccagaaacgctggtgaaagtaaaagatgctgaagatcagttgggtgcacgagtgggttacatcgaactggatctcaacagcggtaagatccttgagagttttcgccccgaagaacgttttccaatgatgagcacttttaaagttctgctatgtggcgcggtattatcccgtattgacgccgggcaagagcaactcggtcgccgcatacactattctcagaatgacttggttgagtactcaccagtcacagaaaagcatcttacggatggcatgacagtaagagaattatgcagtgctgccataaccatgagtgataacactgcggccaacttacttctgacaacgatcggaggaccgaaggagctaaccgcttttttgcacaacatgggggatcatgtaactcgccttgatcgttgggaaccggagctgaatgaagccataccaaacgacgagcgtgacaccacgatgcctgtagcaatggcaacaacgttgcgcaaactattaactggcgaactacttactctagcttcccggcaacaattaatagactggatggaggcggataaagttgcaggaccacttctgcgctcggcccttccggctggctggtttattgctgataaatctggagccggtgagcgtgggtctcgcggtatcattgcagcactggggccagatggtaagccctcccgtatcgtagttatctacacgacggggagtcaggcaactatggatgaacgaaatagacagatcgctgagataggtgcctcactgattaagcattggtaactgtcagaccaagtttactcatatatactttagattgatttaaaacttcatttttaatttaaaaggatctaggtgaagatcctttttgataatctcatgaccaaaatcccttaacgtgagttttcgttccactgagcgtcagaccccgtagaaaagatcaaaggatcttcttgagatcctttttttctgcgcgtaatctgctgcttgcaaacaaaaaaaccaccgctaccagcggtggtttgtttgccggatcaagagctaccaactctttttccgaaggtaactggcttcagcagagcgcagataccaaatactgttcttctagtgtagccgtagttaggccaccacttcaagaactctgtagcaccgcctacatacctcgctctgctaatcctgttaccagtggctgctgccagtggcgataagtcgtgtcttaccgggttggactcaagacgatagttaccggataaggcgcagcggtcgggctgaacggggggttcgtgcacacagcccagcttggagcgaacgacctacaccgaactgagatacctacagcgtgagctatgagaaagcgccacgcttcccgaagggagaaaggcggacaggtatccggtaagcggcagggtcggaacaggagagcgcacgagggagcttccagggggaaacgcctggtatctttatagtcctgtcgggtttcgccacctctgacttgagcgtcgatttttgtgatgctcgtcaggggggcggagcctatggaaaaacgccagcaacgcggcctttttacggttcctggccttttgctggccttttgctcacatgttctttcctgcgttatcccctgattctgtggataaccgtattaccgcctttgagtgagctgataccgctcgccgcagccgaacgaccgagcgcagcgagtcagtgagcgaggaagcggaagagcgcccaatacgcaaaccgcctctccccgcgcgttggccgattcattaatgcagctggcacgacaggtttcccgactggaaagcgggcagtgagcgcaacgcaattaatgtgagttagctcactcattaggcaccccaggctttacactttatgcttccggctcgtatgttgtgtggaattgtgagcggataacaatttcacacaggaaacagctatgaccatgattacgccaagcttgcatgcaggcctctgcagtcgacgggcccgggatcccttaagatttaatacgactcactataggggaattgtgagcggataacaattcccggcgcgccgacttcgagcgaaggagacttcgaatgaagttggataataacaaccatagcgtcttccttctgtactatcatttggtattagttgtcaagtatcgtcgccaggtgattgatgacacaatctcggattacgcgaaggatatgtttgtccgtttaggtaagaattacaacattagcctggtagagtggaatcatgacatggaccatgttcacatcttattcaaagctcaccccaactcggaattgtcgaagttcattaatgcgtacaagtctgcttcaagtcgccttattaagaagcattttcctcaagtaaagcgcaaattgtggaaggagtacttttggtcccgctcattttgcctgcttacaacaggaggagcgcctatcgaggtcatcaaaaaatacatcgaaaatcaggggatgaaatgataacctaggcttgctgcctgcgctgagcaataactagcataaccccttggggcctctaaacgggtcttgaggggttttttgctgaaacctcaggaagacttaacacgataggaagctggaatagtttcgaacgatggttattaatcctaataacggaacgctgtctggaggatgagtgtgacggagtgtaactctcatccgtggattggcggagcgggcctcgtaaaaggctcgtttttttcaccttaattaggcgagaagactcccacttcaacgaagcgaagcggagtaagtgggagatgaatcgccttaactatattttgctgaaaataggatagattcagtaaaatatagtatcatatagttagatgggaggtgaaaacggttacctgatcggcacgtaagaggttccaactttcaccataatgaaataagatcactaccgggcgtattttttgagttatcgagattttcaggagctaaggaagctagttaacatggagaaaaaaatcactggatataccaccgttgatatatcccaatggcatcgtaaagaacattttgaggcatttcagtcagttgctcaatgtacctataaccagaccgttcagctggatattacggcctttttaaagaccgtaaagaaaaataagcacaagttttatccggcctttattcacattcttgcccgcctgatgaatgctcatccggagttccgtatggcaatgaaagacggtgagctggtgatatgggatagtgttcacccttgttacaccgttttccatgagcaaactgaaacgttttcatcgctctggagtgaataccacgacgatttccggcagtttctacacatatattcgcaagatgtggcgtgttacggtgaaaacctggcctatttccctaaagggtttattgagaatatgtttttcgtctcagccaatccctgggtgagtttcaccagttttgatttaaacgtggccaatatggacaacttcttcgcccccgttttcactatgggcaaatattatacgcaaggcgacaaggtgctgatgccgctggcgattcaggttcatcatgccgtttgtgatggcttccatgtcggcagaatgcttaatgaattacaacagtactgcgatgagtggcagggcggggcgtaacacgtgcacgcctcaaagaataaggattgcttgaagcagtcaaacttctttggaagcccccacttcaaattttcgctagaaaattaagtgggggtagttcacggacaagtggttcaccatgcgttgctttatggtatgatagagcgtgaggtgaggaccggtgtctggcagctctaatcttttctagatgcattcgcgaggtaccgagctcgaattcactggccgtcgttttacaacgtcgtgactgggaaaaccctggcgttacccaacttaatcgccttgcagcacatccccctttcgccagctggcgtaatagcgaagaggcccgcaccgatcgcccttcccaacagttgcgcagcctgaatggcgaatggcgcctgatgcggtattttctccttacgcatctgtgcggtatttcacaccgcatatggtgcactctcagtacaatctgctctgatgccgcatagttaagccagccccgacacccgccaacacccgctgacgcgccctgacgggcttgtctgctcccggcatccgcttacagacaagctgtgaccgtctccgggagctgcatgtgtcagaggttttcaccgtcatcaccgaaacgcgcgagacgaaagggcctcgtgatacgcctatttttataggttaatgtcatgataat

SEQ ID NO: 135 - DNA, 4530 bp, synthetic construct
  source 1..4530: mol_type = other DNA
aatggtttcttagacgtcaggtggcacttttcggggaaatgtgcgcggaacccctatttgtttatttttctaaatacattcaaatatgtatccgctcatgagacaataaccctgataaatgcttcaataatattgaaaaaggaagagtatgagtattcaacatttccgtgtcgcccttattcccttttttgcggcattttgccttcctgtttttgctcacccagaaacgctggtgaaagtaaaagatgctgaagatcagttgggtgcacgagtgggttacatcgaactggatctcaacagcggtaagatccttgagagttttcgccccgaagaacgttttccaatgatgagcacttttaaagttctgctatgtggcgcggtattatcccgtattgacgccgggcaagagcaactcggtcgccgcatacactattctcagaatgacttggttgagtactcaccagtcacagaaaagcatcttacggatggcatgacagtaagagaattatgcagtgctgccataaccatgagtgataacactgcggccaacttacttctgacaacgatcggaggaccgaaggagctaaccgcttttttgcacaacatgggggatcatgtaactcgccttgatcgttgggaaccggagctgaatgaagccataccaaacgacgagcgtgacaccacgatgcctgtagcaatggcaacaacgttgcgcaaactattaactggcgaactacttactctagcttcccggcaacaattaatagactggatggaggcggataaagttgcaggaccacttctgcgctcggcccttccggctggctggtttattgctgataaatctggagccggtgagcgtgggtctcgcggtatcattgcagcactggggccagatggtaagccctcccgtatcgtagttatctacacgacggggagtcaggcaactatggatgaacgaaatagacagatcgctgagataggtgcctcactgattaagcattggtaactgtcagaccaagtttactcatatatactttagattgatttaaaacttcatttttaatttaaaaggatctaggtgaagatcctttttgataatctcatgaccaaaatcccttaacgtgagttttcgttccactgagcgtcagaccccgtagaaaagatcaaaggatcttcttgagatcctttttttctgcgcgtaatctgctgcttgcaaacaaaaaaaccaccgctaccagcggtggtttgtttgccggatcaagagctaccaactctttttccgaaggtaactggcttcagcagagcgcagataccaaatactgttcttctagtgtagccgtagttaggccaccacttcaagaactctgtagcaccgcctacatacctcgctctgctaatcctgttaccagtggctgctgccagtggcgataagtcgtgtcttaccgggttggactcaagacgatagttaccggataaggcgcagcggtcgggctgaacggggggttcgtgcacacagcccagcttggagcgaacgacctacaccgaactgagatacctacagcgtgagctatgagaaagcgccacgcttcccgaagggagaaaggcggacaggtatccggtaagcggcagggtcggaacaggagagcgcacgagggagcttccagggggaaacgcctggtatctttatagtcctgtcgggtttcgccacctctgacttgagcgtcgatttttgtgatgctcgtcaggggggcggagcctatggaaaaacgccagcaacgcggcctttttacggttcctggccttttgctggccttttgctcacatgttctttcctgcgttatcccctgattctgtggataaccgtattaccgcctttgagtgagctgataccgctcgccgcagccgaacgaccgagcgcagcgagtcagtgagcgaggaagcggaagagcgcccaatacgcaaaccgcctctccccgcgcgttggccgattcattaatgcagctggcacgacaggtttcccgactggaaagcgggcagtgagcgcaacgcaattaatgtgagttagctcactcattaggcaccccaggctttacactttatgcttccggctcgtatgttgtgtggaattgtgagcggataacaatttcacacaggaaacagctatgaccatgattacgccaagcttgcatgcaggcctctgcagtcgacgggcccgggatcccttaagatttaatacgactcactataggggaattgtgagcggataacaattcccggcgcgccgacttcgagcgaaggagacttcgaatgaagttggataataacaaccatagcgtcttccttctgtactatcatttggtattagttgtcaagtatcgtcgccaggtgattgatgacacaatctcggattacgcgaaggatatgtttgtccgtttaggtaagaattacaacattagcctggtagagtggaatcatgacatggaccatgttcacatcttattcaaagctcaccccaactcggaattgtcgaagttcattaatgcgtacaagtctgcttcaagtcgccttattaagaagcattttcctcaagtaaagcgcaaattgtggaaggagtacttttggtcccgctcattttgcctgcttacaacaggaggagcgcctatcgaggtcatcaaaaaatacatcgaaaatcaggggatgaaatgataacctaggcttgctgcctgcgctgagcaataactagcataaccccttggggcctctaaacgggtcttgaggggttttttgctgaaacctcaggaagacttaacacgataggaagctggaatagtttcgaacgatggttattaatcctaataacggaacgctgtctggaggatgagtgtgacggagtgtaactctcatccgtggattggcggagcgggcctcgtaaaaggctcgttttttttatcttaattaggcgagaagactcccacttcaacgaagcgaagcggagtaagtgggagatgaatcgccttaactatattttgctgaaaataggatagattcagtaaaatatagtatcatatagttagatgggaggtgaaaacggttacctgatcggcacgtaagaggttccaactttcaccataatgaaataagatcactaccgggcgtattttttgagttatcgagattttcaggagctaaggaagctagttaacatggagaaaaaaatcactggatataccaccgttgatatatcccaatggcatcgtaaagaacattttgaggcatttcagtcagttgctcaatgtacctataaccagaccgttcagctggatattacggcctttttaaagaccgtaaagaaaaataagcacaagttttatccggcctttattcacattcttgcccgcctgatgaatgctcatccggagttccgtatggcaatgaaagacggtgagctggtgatatgggatagtgttcacccttgttacaccgttttccatgagcaaactgaaacgttttcatcgctctggagtgaataccacgacgatttccggcagtttctacacatatattcgcaagatgtggcgtgttacggtgaaaacctggcctatttccctaaagggtttattgagaatatgtttttcgtctcagccaatccctgggtgagtttcaccagttttgatttaaacgtggccaatatggacaacttcttcgcccccgttttcactatgggcaaatattatacgcaaggcgacaaggtgctgatgccgctggcgattcaggttcatcatgccgtttgtgatggcttccatgtcggcagaatgcttaatgaattacaacagtactgcgatgagtggcagggcggggcgtaacacgtgcacgcctcaaagaataaggattgcttgaagcagtcaaacttctttggaagcccccacttcaaattttcgctagaaaattaagtgggggtagtttatggacaagtggttcaccatgcgttgctttatggtatgatagagcgtgaggtgaggaccggtgtctggcagctctaatcttttctagatgcattcgcgaggtaccgagctcgaattcactggccgtcgttttacaacgtcgtgactgggaaaaccctggcgttacccaacttaatcgccttgcagcacatccccctttcgccagctggcgtaatagcgaagaggcccgcaccgatcgcccttcccaacagttgcgcagcctgaatggcgaatggcgcctgatgcggtattttctccttacgcatctgtgcggtatttcacaccgcatatggtgcactctcagtacaatctgctctgatgccgcatagttaagccagccccgacacccgccaacacccgctgacgcgccctgacgggcttgtctgctcccggcatccgcttacagacaagctgtgaccgtctccgggagctgcatgtgtcagaggttttcaccgtcatcaccgaaacgcgcgagacgaaagggcctcgtgatacgcctatttttataggttaatgtcatgataat

SEQ ID NO: 136 - DNA, 4418 bp, synthetic construct
  source 1..4418: mol_type = other DNA
gtcagaggtggcgaaacccgacaggactataaagataccaggcgtttccccctggaagctccctcgtgcgctctcctgttccgaccctgccgcttaccggatacctgtccgcctttctcccttcgggaagcgtggcgctttctcatagctcacgctgtaggtatctcagttcggtgtaggtcgttcgctccaagctgggctgtgtgcacgaaccccccgttcagcccgaccgctgcgccttatccggtaactatcgtcttgagtccaacccggtaagacacgacttatcgccactggcagcagccactggtaacaggattagcagagcgaggtatgtaggcggtgctacagagttcttgaagtggtggcctaactacggctacactagaagaacagtatttggtatctgcgctctgctgaagccagttaccttcggaaaaagagttggtagctcttgatccggcaaacaaaccaccgctggtagcggtggtttttttgtttgcaagcagcagattacgcgcagaaaaaaaggatctcaagaagatcctttgatcttttctacggggtctgacgctcagtggaacgaaaactcacgttaagggattttggtcatgagattatcaaaaaggatcttcacctagatccttttaaattaaaaatgaagttttaaatcaatctaaagtatatatgagtaaacttggtctgacagttaccaatgcttaatcagtgaggcacctatctcagcgatctgtctatttcgttcatccatagttgcctgactccccgtcgtgtagataactacgatacgggagggcttaccatctggccccagtgctgcaatgataccgcgagacccacgctcaccggctccagatttatcagcaataaaccagccagccggaagggccgagcgcagaagtggtcctgcaactttatccgcctccatccagtctattaattgttgccgggaagctagagtaagtagttcgccagttaatagtttgcgcaacgttgttgccattgctacaggcatcgtggtgtcacgctcgtcgtttggtatggcttcattcagctccggttcccaacgatcaaggcgagttacatgatcccccatgttgtgcaaaaaagcggttagctccttcggtcctccgatcgttgtcagaagtaagttggccgcagtgttatcactcatggttatggcagcactgcataattctcttactgtcatgccatccgtaagatgcttttctgtgactggtgagtactcaaccaagtcattctgagaatagtgtatgcggcgaccgagttgctcttgcccggcgtcaatacgggataataccgcgccacatagcagaactttaaaagtgctcatcattggaaaacgttcttcggggcgaaaactctcaaggatcttaccgctgttgagatccagttcgatgtaacccactcgtgcacccaactgatcttcagcatcttttactttcaccagcgtttctgggtgagcaaaaacaggaaggcaaaatgccgcaaaaaagggaataagggcgacacggaaatgttgaatactcatactcttcctttttcaatattattgaagcatttatcagggttattgtctcatgagcggatacatatttgaatgtatttagaaaaataaacaaataggggttccgcgcacatttccccgaaaagtgccacctgacgtctaagaaaccattattatcatgacattaacctataaaaataggcgtatcacgaggccctttcgtctcgcgcgtttcggtgatgacggtgaaaacctctgacacatgcagctcccggagacggtcacagcttgtctgtaagcggatgccgggagcagacaagcccgtcagggcgcgtcagcgggtgttggcgggtgtcggggctggcttaactatgcggcatcagagcagattgtactgagagtgcaccatatgcggtgtgaaataccgcacagatgcgtaaggagaaaataccgcatcaggcgccattcgccattcaggctgcgcaactgttgggaagggcgatcggtgcgggcctcttcgctattacgccagctggcgaaagggggatgtgctgcaaggcgattaagttgggtaacgccagggttttcccagtcacgacgttgtaaaacgacggccagtgaattcgagctcggtacctcgcgaatgcatctagatcgcatacaataccggtcgcttgacatactccccatagctaaagctaggggattctagctaaagcatgaggaaaattgggatcaagcaaactcagcctacacgtgttacgccccgccctgccactcatcgcagtactgttgtaattcattaagcattctgccgacatggaagccatcacaaacggcatgatgaacctgaatcgccagcggcatcagcaccttgtcgccttgcgtataatatttgcccatagtgaaaacgggggcgaagaagttgtccatattggccacgtttaaatcaaaactggtgaaactcacccagggattggctgagacgaaaaacatattctcaataaaccctttagggaaataggccaggttttcaccgtaacacgccacatcttgcgaatatatgtgtagaaactgccggaaatcgtcgtggtattcactccagagcgatgaaaacgtttcagtttgctcatggaaaacggtgtaacaagggtgaacactatcccatatcaccagctcaccgtctttcattgccatacggaactccggatgagcattcatcaggcgggcaagaatgtgaataaaggccggataaaacttgtgcttatttttctttacggtctttaaaaaggccgtaatatccagctgaacggtctggttataggtacattgagcaactgactgaaatgcctcaaaatgttctttacgatgccattgggatatatcaacggtggtatatccagtgatttttttctccatggtagcttccttagctcctgaaaatctcgataactcaaaaaatacgcccggtagtgatcttatttcattatggtgaaagttggaacctcttacgtgccgatcaggtaaccatttgtagtatatataaaaaaataactaatacaagatattcataacattacccttatttttgtgcatgatattgactctaatacccctattccatattggcacgcctaaaggcgtttcgccttgtatccccatagctaaaagctaggggctttaaggcgttagttttggtaaatgcctgaggtttcagcaaaaaacccctcaagacccgtttagaggccccaaggggttatgctagttattgctcagccctaggctactgttaacaatcacagcgccttagtctgcaggttgtccacgtatgacttccatttttccttctgcttaggacggttactgttttgttgattctcgatatactgcttcacgacattcagcggagcacctcctactgtactgatgaaacaggagttcgtccaaagcgtcggtaacttcgtttttaagtggttgaactcctggcgcagaatgcgactgctgcgccccttagctgtcttaataaacttcataacgccgaaactggggtcgatgtcggctaagatgtggatgtgatctttgtccgtttgcatttcaatgatctctacacgtaattcttttgcaacttcttgaataatctctttcaaacgcatctcgacggctcctactaagactttacgacggtacttaggacaccatacgatgtgatacttacacgaatagaccacattgtggttggatttatataacacggcgttgctcattcgaatatatctccttcgctcgaagtcggcgcgccgggaattgttatccgctcacaattcccctatagtgagtcgtattaaatcttaagttactgccatatcggatcccgggcccgtcgactgcagaggcctgcatgcaagcttggcgtaatcatggtcatagctgtttcctgtgtgaaattgttatccgctcacaattccacacaacatacgagccggaagcataaagtgtaaagcctggggtgcctaatgagtgagctaactcacattaattgcgttgcgctcactgcccgctttccagtcgggaaacctgtcgtgccagctgcattaatgaatcggccaacgcgcggggagaggcggtttgcgtattgggcgctcttccgcttcctcgctcactgactcgctgcgctcggtcgttcggctgcggcgagcggtatcagctcactcaaaggcggtaatacggttatccacagaatcaggggataacgcaggaaagaacatgtgagcaaaaggccagcaaaaggccaggaaccgtaaaaaggccgcgttgctggcgtttttccataggctccgcccccctgacgagcatcacaaaaatcgacgctcaa

SEQ ID NO: 137 - DNA, 4418 bp, synthetic construct
  source 1..4418: mol_type = other DNA
gtcagaggtggcgaaacccgacaggactataaagataccaggcgtttccccctggaagctccctcgtgcgctctcctgttccgaccctgccgcttaccggatacctgtccgcctttctcccttcgggaagcgtggcgctttctcatagctcacgctgtaggtatctcagttcggtgtaggtcgttcgctccaagctgggctgtgtgcacgaaccccccgttcagcccgaccgctgcgccttatccggtaactatcgtcttgagtccaacccggtaagacacgacttatcgccactggcagcagccactggtaacaggattagcagagcgaggtatgtaggcggtgctacagagttcttgaagtggtggcctaactacggctacactagaagaacagtatttggtatctgcgctctgctgaagccagttaccttcggaaaaagagttggtagctcttgatccggcaaacaaaccaccgctggtagcggtggtttttttgtttgcaagcagcagattacgcgcagaaaaaaaggatctcaagaagatcctttgatcttttctacggggtctgacgctcagtggaacgaaaactcacgttaagggattttggtcatgagattatcaaaaaggatcttcacctagatccttttaaattaaaaatgaagttttaaatcaatctaaagtatatatgagtaaacttggtctgacagttaccaatgcttaatcagtgaggcacctatctcagcgatctgtctatttcgttcatccatagttgcctgactccccgtcgtgtagataactacgatacgggagggcttaccatctggccccagtgctgcaatgataccgcgagacccacgctcaccggctccagatttatcagcaataaaccagccagccggaagggccgagcgcagaagtggtcctgcaactttatccgcctccatccagtctattaattgttgccgggaagctagagtaagtagttcgccagttaatagtttgcgcaacgttgttgccattgctacaggcatcgtggtgtcacgctcgtcgtttggtatggcttcattcagctccggttcccaacgatcaaggcgagttacatgatcccccatgttgtgcaaaaaagcggttagctccttcggtcctccgatcgttgtcagaagtaagttggccgcagtgttatcactcatggttatggcagcactgcataattctcttactgtcatgccatccgtaagatgcttttctgtgactggtgagtactcaaccaagtcattctgagaatagtgtatgcggcgaccgagttgctcttgcccggcgtcaatacgggataataccgcgccacatagcagaactttaaaagtgctcatcattggaaaacgttcttcggggcgaaaactctcaaggatcttaccgctgttgagatccagttcgatgtaacccactcgtgcacccaactgatcttcagcatcttttactttcaccagcgtttctgggtgagcaaaaacaggaaggcaaaatgccgcaaaaaagggaataagggcgacacggaaatgttgaatactcatactcttcctttttcaatattattgaagcatttatcagggttattgtctcatgagcggatacatatttgaatgtatttagaaaaataaacaaataggggttccgcgcacatttccccgaaaagtgccacctgacgtctaagaaaccattattatcatgacattaacctataaaaataggcgtatcacgaggccctttcgtctcgcgcgtttcggtgatgacggtgaaaacctctgacacatgcagctcccggagacggtcacagcttgtctgtaagcggatgccgggagcagacaagcccgtcagggcgcgtcagcgggtgttggcgggtgtcggggctggcttaactatgcggcatcagagcagattgtactgagagtgcaccatatgcggtgtgaaataccgcacagatgcgtaaggagaaaataccgcatcaggcgccattcgccattcaggctgcgcaactgttgggaagggcgatcggtgcgggcctcttcgctattacgccagctggcgaaagggggatgtgctgcaaggcgattaagttgggtaacgccagggttttcccagtcacgacgttgtaaaacgacggccagtgaattcgagctcggtacctcgcgaatgcatctagatcgcatacaataccggtcgcttgacatactccccatagctaaagctaggggattctagctaaagcatgaggaaaattgggatcaagcaaactcagcctacacgtgttacgccccgccctgccactcatcgcagtactgttgtaattcattaagcattctgccgacatggaagccatcacaaacggcatgatgaacctgaatcgccagcggcatcagcaccttgtcgccttgcgtataatatttgcccatagtgaaaacgggggcgaagaagttgtccatattggccacgtttaaatcaaaactggtgaaactcacccagggattggctgagacgaaaaacatattctcaataaaccctttagggaaataggccaggttttcaccgtaacacgccacatcttgcgaatatatgtgtagaaactgccggaaatcgtcgtggtattcactccagagcgatgaaaacgtttcagtttgctcatggaaaacggtgtaacaagggtgaacactatcccatatcaccagctcaccgtctttcattgccatacggaactccggatgagcattcatcaggcgggcaagaatgtgaataaaggccggataaaacttgtgcttatttttctttacggtctttaaaaaggccgtaatatccagctgaacggtctggttataggtacattgagcaactgactgaaatgcctcaaaatgttctttacgatgccattgggatatatcaacggtggtatatccagtgatttttttctccatggtagcttccttagctcctgaaaatctcgataactcaaaaaatacgcccggtagtgatcttatttcattatggtgaaagttggaacctcttacgtgccgatcaggtaaccatttgtagtatatataaaaaaataactaatacaagatattcataacattacccttatttttgtgcatgatattgactctaatacccctattccatattggcacgcctaaaggcgtttcgccttgtatccccatagctaaaagctaggggctttaaggcgttagttttggtaaatgcctgaggtttcagcaaaaaacccctcaagacccgtttagaggccccaaggggttatgctagttattgctcagccctaggctactgttaacaatcacagcgccttagtctgcaggttgtccacgtatgacttccatttttccttctgcttaggacggttactgttttgttgattctcgatggcctgcttcacgacattcagcggagcacctcctactgtactgatgaaacaggagttcgtccaaagcgtcggtaacttcgtttttaagtggttgaactcctggcgcagaatgcgactgctgcgccccttagctgtcttaataaacttcataacgccgaaactggggtcgatgtcggctaagatgtggatgtgatctttgtccgtttgcatttcaatgatctctacacgtaattcttttgcaacttcttgaataatctctttcaaacgcatctcgacggctcctactaagactttacgacggtacttaggacaccatacgatgtgatacttacacgaatagaccacattgtggttggatttatataacacggcgttgctcattcgaatatatctccttcgctcgaagtcggcgcgccgggaattgttatccgctcacaattcccctatagtgagtcgtattaaatcttaagttactgccatatcggatcccgggcccgtcgactgcagaggcctgcatgcaagcttggcgtaatcatggtcatagctgtttcctgtgtgaaattgttatccgctcacaattccacacaacatacgagccggaagcataaagtgtaaagcctggggtgcctaatgagtgagctaactcacattaattgcgttgcgctcactgcccgctttccagtcgggaaacctgtcgtgccagctgcattaatgaatcggccaacgcgcggggagaggcggtttgcgtattgggcgctcttccgcttcctcgctcactgactcgctgcgctcggtcgttcggctgcggcgagcggtatcagctcactcaaaggcggtaatacggttatccacagaatcaggggataacgcaggaaagaacatgtgagcaaaaggccagcaaaaggccaggaaccgtaaaaaggccgcgttgctggcgtttttccataggctccgcccccctgacgagcatcacaaaaatcgacgctcaa

SEQ ID NO: 138 - DNA, 4534 bp, synthetic construct
  source 1..4534: mol_type = other DNA
ccttttgctcacatgttctttcctgcgttatcccctgattctgtggataaccgtattaccgcctttgagtgagctgataccgctcgccgcagccgaacgaccgagcgcagcgagtcagtgagcgaggaagcggaagagcgcccaatacgcaaaccgcctctccccgcgcgttggccgattcattaatgcagctggcacgacaggtttcccgactggaaagcgggcagtgagcgcaacgcaattaatgtgagttagctcactcattaggcaccccaggctttacactttatgcttccggctcgtatgttgtgtggaattgtgagcggataacaatttcacacaggaaacagctatgaccatgattacgccaagcttgcatgcaggcctctgcagtcgacgggcccgggatcccttaagatttaatacgactcactataggggaattgtgagcggataacaattcccggcgcgccgacttcgagcgaaggagacttcgaatgaagttggataataacaaccatagcgtcttccttctgtactatcatttggtattagttgtcaagtatcgtcgccaggtgattgatgacacaatctcggattacgcgaaggatatgtttgtccgtttaggtaagaattacaacattagcctggtagagtggaatcatgacatggaccatgttcacatcttattcaaagctcaccccaactcggaattgtcgaagttcattaatgcgtacaagtctgcttcaagtcgccttattaagaagcattttcctcaagtaaagcgcaaattgtggaaggagtacttttggtcccgctcattttgcctgcttacaacaggaggagcgcctatcgaggtcatcaaaaaatacatcgaaaatcaggggatgaaatgataacctaggcttgctgcctgcgctgagcaataactagcataaccccttggggcctctaaacgggtcttgaggggttttttgctgaaacctcaggaagacttaacacgataggaagctggaatagtttcgaacgatggttattaatcctaataacggaacgctgtctggaggatgagtgtgacggagtgtaactcagaaagtgaatgaaagacatgaactaaaatattggataccaaaaatttaccaaaactaacgccttaaagcccctagcttttagctatggggatacaaggcgaaacgcctttaggcgtgccaatatggaataggggtattagagtcaatatcatgcacaaaaataagggtaatgttatgaatatcttgtattagttatttttttatatatactacaaatggttacctgatcggcacgtaagaggttccaactttcaccataatgaaataagatcactaccgggcgtattttttgagttatcgagattttcaggagctaaggaagctaccatggagaaaaaaatcactggatataccaccgttgatatatcccaatggcatcgtaaagaacattttgaggcatttcagtcagttgctcaatgtacctataaccagaccgttcagctggatattacggcctttttaaagaccgtaaagaaaaataagcacaagttttatccggcctttattcacattcttgcccgcctgatgaatgctcatccggagttccgtatggcaatgaaagacggtgagctggtgatatgggatagtgttcacccttgttacaccgttttccatgagcaaactgaaacgttttcatcgctctggagtgaataccacgacgatttccggcagtttctacacatatattcgcaagatgtggcgtgttacggtgaaaacctggcctatttccctaaagggtttattgagaatatgtttttcgtctcagccaatccctgggtgagtttcaccagttttgatttaaacgtggccaatatggacaacttcttcgcccccgttttcactatgggcaaatattatacgcaaggcgacaaggtgctgatgccgctggcgattcaggttcatcatgccgtttgtgatggcttccatgtcggcagaatgcttaatgaattacaacagtactgcgatgagtggcagggcggggcgtaacacgtgtaggctgagtttgcttgatcccaattttcctcatgctttagctagaatcccctagctttagctatggggagtatgtcaagctgatcgaaaagcatgaactgccttctgtgtactgggaagcacggtttcaccggtgtctggcagctctaatcttttctagatgcattcgcgaggtaccgagctcgaattcactggccgtcgttttacaacgtcgtgactgggaaaaccctggcgttacccaacttaatcgccttgcagcacatccccctttcgccagctggcgtaatagcgaagaggcccgcaccgatcgcccttcccaacagttgcgcagcctgaatggcgaatggcgcctgatgcggtattttctccttacgcatctgtgcggtatttcacaccgcatatggtgcactctcagtacaatctgctctgatgccgcatagttaagccagccccgacacccgccaacacccgctgacgcgccctgacgggcttgtctgctcccggcatccgcttacagacaagctgtgaccgtctccgggagctgcatgtgtcagaggttttcaccgtcatcaccgaaacgcgcgagacgaaagggcctcgtgatacgcctatttttataggttaatgtcatgataataatggtttcttagacgtcaggtggcacttttcggggaaatgtgcgcggaacccctatttgtttatttttctaaatacattcaaatatgtatccgctcatgagacaataaccctgataaatgcttcaataatattgaaaaaggaagagtatgagtattcaacatttccgtgtcgcccttattcccttttttgcggcattttgccttcctgtttttgctcacccagaaacgctggtgaaagtaaaagatgctgaagatcagttgggtgcacgagtgggttacatcgaactggatctcaacagcggtaagatccttgagagttttcgccccgaagaacgttttccaatgatgagcacttttaaagttctgctatgtggcgcggtattatcccgtattgacgccgggcaagagcaactcggtcgccgcatacactattctcagaatgacttggttgagtactcaccagtcacagaaaagcatcttacggatggcatgacagtaagagaattatgcagtgctgccataaccatgagtgataacactgcggccaacttacttctgacaacgatcggaggaccgaaggagctaaccgcttttttgcacaacatgggggatcatgtaactcgccttgatcgttgggaaccggagctgaatgaagccataccaaacgacgagcgtgacaccacgatgcctgtagcaatggcaacaacgttgcgcaaactattaactggcgaactacttactctagcttcccggcaacaattaatagactggatggaggcggataaagttgcaggaccacttctgcgctcggcccttccggctggctggtttattgctgataaatctggagccggtgagcgtgggtctcgcggtatcattgcagcactggggccagatggtaagccctcccgtatcgtagttatctacacgacggggagtcaggcaactatggatgaacgaaatagacagatcgctgagataggtgcctcactgattaagcattggtaactgtcagaccaagtttactcatatatactttagattgatttaaaacttcatttttaatttaaaaggatctaggtgaagatcctttttgataatctcatgaccaaaatcccttaacgtgagttttcgttccactgagcgtcagaccccgtagaaaagatcaaaggatcttcttgagatcctttttttctgcgcgtaatctgctgcttgcaaacaaaaaaaccaccgctaccagcggtggtttgtttgccggatcaagagctaccaactctttttccgaaggtaactggcttcagcagagcgcagataccaaatactgttcttctagtgtagccgtagttaggccaccacttcaagaactctgtagcaccgcctacatacctcgctctgctaatcctgttaccagtggctgctgccagtggcgataagtcgtgtcttaccgggttggactcaagacgatagttaccggataaggcgcagcggtcgggctgaacggggggttcgtgcacacagcccagcttggagcgaacgacctacaccgaactgagatacctacagcgtgagctatgagaaagcgccacgcttcccgaagggagaaaggcggacaggtatccggtaagcggcagggtcggaacaggagagcgcacgagggagcttccagggggaaacgcctggtatctttatagtcctgtcgggtttcgccacctctgacttgagcgtcgatttttgtgatgctcgtcaggggggcggagcctatggaaaaacgccagcaacgcggcctttttacggttcctggccttttgctgg

SEQ ID NO: 139 - DNA, 4615 bp, synthetic construct
  source 1..4615: mol_type = other DNA
aatggtttcttagacgtcaggtggcacttttcggggaaatgtgcgcggaacccctatttgtttatttttctaaatacattcaaatatgtatccgctcatgagacaataaccctgataaatgcttcaataatattgaaaaaggaagagtatgagtattcaacatttccgtgtcgcccttattcccttttttgcggcattttgccttcctgtttttgctcacccagaaacgctggtgaaagtaaaagatgctgaagatcagttgggtgcacgagtgggttacatcgaactggatctcaacagcggtaagatccttgagagttttcgccccgaagaacgttttccaatgatgagcacttttaaagttctgctatgtggcgcggtattatcccgtattgacgccgggcaagagcaactcggtcgccgcatacactattctcagaatgacttggttgagtactcaccagtcacagaaaagcatcttacggatggcatgacagtaagagaattatgcagtgctgccataaccatgagtgataacactgcggccaacttacttctgacaacgatcggaggaccgaaggagctaaccgcttttttgcacaacatgggggatcatgtaactcgccttgatcgttgggaaccggagctgaatgaagccataccaaacgacgagcgtgacaccacgatgcctgtagcaatggcaacaacgttgcgcaaactattaactggcgaactacttactctagcttcccggcaacaattaatagactggatggaggcggataaagttgcaggaccacttctgcgctcggcccttccggctggctggtttattgctgataaatctggagccggtgagcgtgggtctcgcggtatcattgcagcactggggccagatggtaagccctcccgtatcgtagttatctacacgacggggagtcaggcaactatggatgaacgaaatagacagatcgctgagataggtgcctcactgattaagcattggtaactgtcagaccaagtttactcatatatactttagattgatttaaaacttcatttttaatttaaaaggatctaggtgaagatcctttttgataatctcatgaccaaaatcccttaacgtgagttttcgttccactgagcgtcagaccccgtagaaaagatcaaaggatcttcttgagatcctttttttctgcgcgtaatctgctgcttgcaaacaaaaaaaccaccgctaccagcggtggtttgtttgccggatcaagagctaccaactctttttccgaaggtaactggcttcagcagagcgcagataccaaatactgttcttctagtgtagccgtagttaggccaccacttcaagaactctgtagcaccgcctacatacctcgctctgctaatcctgttaccagtggctgctgccagtggcgataagtcgtgtcttaccgggttggactcaagacgatagttaccggataaggcgcagcggtcgggctgaacggggggttcgtgcacacagcccagcttggagcgaacgacctacaccgaactgagatacctacagcgtgagctatgagaaagcgccacgcttcccgaagggagaaaggcggacaggtatccggtaagcggcagggtcggaacaggagagcgcacgagggagcttccagggggaaacgcctggtatctttatagtcctgtcgggtttcgccacctctgacttgagcgtcgatttttgtgatgctcgtcaggggggcggagcctatggaaaaacgccagcaacgcggcctttttacggttcctggccttttgctggccttttgctcacatgttctttcctgcgttatcccctgattctgtggataaccgtattaccgcctttgagtgagctgataccgctcgccgcagccgaacgaccgagcgcagcgagtcagtgagcgaggaagcggaagagcgcccaatacgcaaaccgcctctccccgcgcgttggccgattcattaatgcagctggcacgacaggtttcccgactggaaagcgggcagtgagcgcaacgcaattaatgtgagttagctcactcattaggcaccccaggctttacactttatgcttccggctcgtatgttgtgtggaattgtgagcggataacaatttcacacaggaaacagctatgaccatgattacgccaagcttgcatgcaggcctctgcagtcgacgggcccgggatcccttaagatttaatacgactcactataggggaattgtgagcggataacaattcccggcgcgccgacttcgagcgaaggagacttcgaatgagcaacgccgtgttatataaatccaaccacaatgtggtctattcgtgtaagtatcacatcgtatggtgtcctaagtaccgtcgtaaagtcttagtaggagccgtcgagatgcgtttgaaagagattattcaagaagttgcaaaagaattacgtgtagagatcattgaaatgcaaacggacaaagatcacatccacatcttagccgacatcgaccccagtttcggcgttatgaagtttattaagacagctaaggggcgcagcagtcgcattctgcgccaggagttcaaccacttaaaaacgaagttaccgacgctttggacgaactcctgtttcatcagtacagtaggaggtgctccgctgaatgtcgtgaagcagtatatcgagaatcaacaaaacagtaaccgtcctaagcagaaggaaaaatggaagtcatacgtggacaacctgcagactaaggcgctgtgataacctaggcttgctgcctgcgctgagcaataactagcataaccccttggggcctctaaacgggtcttgaggggttttttgctgaaacctcaggaagacttaacacgataggaagctggaatagtttcgaacgatggttattaatcctaataacggaacgctgtctggaggatgagtgtgacggagtgtaactcagaaagtgaatgaaagacatgaactaaaatattggataccaaaaatttaacatctttccgaaagaagtctcccacttctaaacgaagtgaaagtgggagatgaatttcggttaggtatagcctaaaattgtctcttttttgtgtgttatgatataatcagttttagaaaaatgaaaggctgttgtatcaggttacctgatcggcacgtaagaggttccaactttcaccataatgaaataagatcactaccgggcgtattttttgagttatcgagattttcaggagctaaggaagctagttaacatggagaaaaaaatcactggatataccaccgttgatatatcccaatggcatcgtaaagaacattttgaggcatttcagtcagttgctcaatgtacctataaccagaccgttcagctggatattacggcctttttaaagaccgtaaagaaaaataagcacaagttttatccggcctttattcacattcttgcccgcctgatgaatgctcatccggagttccgtatggcaatgaaagacggtgagctggtgatatgggatagtgttcacccttgttacaccgttttccatgagcaaactgaaacgttttcatcgctctggagtgaataccacgacgatttccggcagtttctacacatatattcgcaagatgtggcgtgttacggtgaaaacctggcctatttccctaaagggtttattgagaatatgtttttcgtctcagccaatccctgggtgagtttcaccagttttgatttaaacgtggccaatatggacaacttcttcgcccccgttttcactatgggcaaatattatacgcaaggcgacaaggtgctgatgccgctggcgattcaggttcatcatgccgtttgtgatggcttccatgtcggcagaatgcttaatgaattacaacagtactgcgatgagtggcagggcggggcgtaacacgtgtttgtcctcgaaccgtggggcacacggggatcgctcggtcaacttcccatcatgagatgggattacccgagaagcccccacctctaagcgaagcgtaggtggtgggagtatgtcacgctgatcgaaaagcatgaactgccttctgtgtactgggaagcacggtttcaccggtgtctggcagctctaatcttttctagatgcattcgcgaggtaccgagctcgaattcactggccgtcgttttacaacgtcgtgactgggaaaaccctggcgttacccaacttaatcgccttgcagcacatccccctttcgccagctggcgtaatagcgaagaggcccgcaccgatcgcccttcccaacagttgcgcagcctgaatggcgaatggcgcctgatgcggtattttctccttacgcatctgtgcggtatttcacaccgcatatggtgcactctcagtacaatctgctctgatgccgcatagttaagccagccccgacacccgccaacacccgctgacgcgccctgacgggcttgtctgctcccggcatccgcttacagacaagctgtgaccgtctccgggagctgcatgtgtcagaggttttcaccgtcatcaccgaaacgcgcgagacgaaagggcctcgtgatacgcctatttttataggttaatgtcatgataat

SEQ ID NO: 140 - DNA, 4806 bp, synthetic construct
  source 1..4806: mol_type = other DNA
cggaacccctatttgtttatttttctaaatacattcaaatatgtatccgctcatgagacaataaccctgataaatgcttcaataatattgaaaaaggaagagtatgagtattcaacatttccgtgtcgcccttattcccttttttgcggcattttgccttcctgtttttgctcacccagaaacgctggtgaaagtaaaagatgctgaagatcagttgggtgcacgagtgggttacatcgaactggatctcaacagcggtaagatccttgagagttttcgccccgaagaacgttttccaatgatgagcacttttaaagttctgctatgtggcgcggtattatcccgtattgacgccgggcaagagcaactcggtcgccgcatacactattctcagaatgacttggttgagtactcaccagtcacagaaaagcatcttacggatggcatgacagtaagagaattatgcagtgctgccataaccatgagtgataacactgcggccaacttacttctgacaacgatcggaggaccgaaggagctaaccgcttttttgcacaacatgggggatcatgtaactcgccttgatcgttgggaaccggagctgaatgaagccataccaaacgacgagcgtgacaccacgatgcctgtagcaatggcaacaacgttgcgcaaactattaactggcgaactacttactctagcttcccggcaacaattaatagactggatggaggcggataaagttgcaggaccacttctgcgctcggcccttccggctggctggtttattgctgataaatctggagccggtgagcgtgggtctcgcggtatcattgcagcactggggccagatggtaagccctcccgtatcgtagttatctacacgacggggagtcaggcaactatggatgaacgaaatagacagatcgctgagataggtgcctcactgattaagcattggtaactgtcagaccaagtttactcatatatactttagattgatttaaaacttcatttttaatttaaaaggatctaggtgaagatcctttttgataatctcatgaccaaaatcccttaacgtgagttttcgttccactgagcgtcagaccccgtagaaaagatcaaaggatcttcttgagatcctttttttctgcgcgtaatctgctgcttgcaaacaaaaaaaccaccgctaccagcggtggtttgtttgccggatcaagagctaccaactctttttccgaaggtaactggcttcagcagagcgcagataccaaatactgttcttctagtgtagccgtagttaggccaccacttcaagaactctgtagcaccgcctacatacctcgctctgctaatcctgttaccagtggctgctgccagtggcgataagtcgtgtcttaccgggttggactcaagacgatagttaccggataaggcgcagcggtcgggctgaacggggggttcgtgcacacagcccagcttggagcgaacgacctacaccgaactgagatacctacagcgtgagctatgagaaagcgccacgcttcccgaagggagaaaggcggacaggtatccggtaagcggcagggtcggaacaggagagcgcacgagggagcttccagggggaaacgcctggtatctttatagtcctgtcgggtttcgccacctctgacttgagcgtcgatttttgtgatgctcgtcaggggggcggagcctatggaaaaacgccagcaacgcggcctttttacggttcctggccttttgctggccttttgctcacatgttctttcctgcgttatcccctgattctgtggataaccgtattaccgcctttgagtgagctgataccgctcgccgcagccgaacgaccgagcgcagcgagtcagtgagcgaggaagcggaagagcgcccaatacgcaaaccgcctctccccgcgcgttggccgattcattaatgcagctggcacgacaggtttcccgactggaaagcgggcagtgagcgcaacgcaattaatgtgagttagctcactcattaggcaccccaggctttacactttatgcttccggctcgtatgttgtgtggaattgtgagcggataacaatttcacacaggaaacagctatgaccatgattacgccaagcttgcatgcaggcctctgcagtcgacgggcccgggatcccttaagatttaatacgactcactataggggaattgtgagcggataacaattcccggcgcgccgacttcgagcgaaggagacttcgaatgaagttggataataacaaccatagcgtcttccttctgtactatcatttggtattagttgtcaagtatcgtcgccaggtgattgatgacacaatctcggattacgcgaaggatatgtttgtccgtttaggtaagaattacaacattagcctggtagagtggaatcatgacatggaccatgttcacatcttattcaaagctcaccccaactcggaattgtcgaagttcattaatgcgtacaagtctgcttcaagtcgccttattaagaagcattttcctcaagtaaagcgcaaattgtggaaggagtacttttggtcccgctcattttgcctgcttacaacaggaggagcgcctatcgaggtcatcaaaaaatacatcgaaaatcaggggatgaaatgataacctaggcttgctgcctgcgctgagcaataactagcataaccccttggggcctctaaacgggtcttgaggggttttttgctgaaacctcagggcggagcgggcctcgtaaaaggctcgttttttttatcttaattaggcgagaagactcccacttcaacgaagcgaagcggagtaagtgggagatgaatcgccttaactatattttgctgaaaataggatagattcagtaaaatatagtatcatatagttagatgggaggtgaaaacggttaccggttaccctgcgctagcatgcctatttgtttatttttctaaatacattcaaatatgtatccgctcatgagacaataaccctgataaatgcttcaataatattgaaaaaggaagagtatgagccatattcaacgggaaacgtcttgctctaggccgcgattaaattccaacatggatgctgatttatatgggtataaatgggctcgcgataatgtcgggcaatcaggtgcgacaatctatcgattgtatgggaagcccgatgcgccagagttgtttctgaaacatggcaaaggtagcgttgccaatgatgttacagatgagatggtcagactaaactggctgacggaatttatgcctcttccgaccatcaagcattttatccgtactcctgatgatgcatggttactcaccactgcgatccccgggaaaacagcattccaggtattagaagaatatcctgattcaggtgaaaatattgttgatgcgctggcagtgttcctgcgccggttgcattcgattcctgtttgtaattgtccttttaacagcgaccgcgtatttcgtctcgctcaggcgcaatcacgaatgaataacggtttggttgatgcgagtgattttgatgacgagcgtaatggctggcctgttgaacaagtctggaaagaaatgcataaacttttgccattctcaccggattcagtcgtcactcatggtgatttctcacttgataaccttatttttgacgaggggaaattaataggttgtattgatgttggacgagtcggaatcgcagaccgataccaggatcttgccatcctatggaactgcctcggtgagttttctccttcattacagaaacggctttttcaaaaatatggtattgataatcctgatatgaataaattgcagtttcatttgatgctcgatgagtttttctaagaattaattcatgagcggatacatatttgaatgtatttagaaaaataaacaaataggggttccgcgcacatttccccgaaaagtgccacttgcggagacccacgtgtccgggagaaattaatacgactcactataggcctcgagttaagcgcggcttgtatcgaacaaagtctggcaaactaattaatgctgatgtcaatggcgcattaaacatcttaaagaaaagtaaagctgtagacctgagtgtcttatgctctagcggcgaagtggacacgcctcaaagaataaggattgcttgaagcagtcaaacttctttggaagcccccacttcaaattttcgctagaaaattaagtgggggtagttcacggacaagtggttcaccatgcgttgctttatggtatgatagtctagatgcattcgcgaggtaccgagctcgaattcactggccgtcgttttacaacgtcgtgactgggaaaaccctggcgttacccaacttaatcgccttgcagcacatccccctttcgccagctggcgtaatagcgaagaggcccgcaccgatcgcccttcccaacagttgcgcagcctgaatggcgaatggcgcctgatgcggtattttctccttacgcatctgtgcggtatttcacaccgcatatggtgcactctcagtacaatctgctctgatgccgcatagttaagccagccccgacacccgccaacacccgctgacgcgccctgacgggcttgtctgctcccggcatccgcttacagacaagctgtgaccgtctccgggagctgcatgtgtcagaggttttcaccgtcatcaccgaaacgcgcgagacgaaagggcctcgtgatacgcctatttttataggttaatgtcatgataataatggtttcttagacgtcaggtggcacttttcggggaaatgtgcg

SEQ ID NO: 141 - DNA, 4378 bp, synthetic construct
  source 1..4378: mol_type = other DNA
cacttcaagaactctgtagcaccgcctacatacctcgctctgctaatcctgttaccagtggctgctgccagtggcgataagtcgtgtcttaccgggttggactcaagacgatagttaccggataaggcgcagcggtcgggctgaacggggggttcgtgcacacagcccagcttggagcgaacgacctacaccgaactgagatacctacagcgtgagctatgagaaagcgccacgcttcccgaagggagaaaggcggacaggtatccggtaagcggcagggtcggaacaggagagcgcacgagggagcttccagggggaaacgcctggtatctttatagtcctgtcgggtttcgccacctctgacttgagcgtcgatttttgtgatgctcgtcaggggggcggagcctatggaaaaacgccagcaacgcggcctttttacggttcctggccttttgctggccttttgctcacatgttctttcctgcgttatcccctgattctgtggataaccgtattaccgcctttgagtgagctgataccgctcgccgcagccgaacgaccgagcgcagcgagtcagtgagcgaggaagcggaagagcgcccaatacgcaaaccgcctctccccgcgcgttggccgattcattaatgcagctggcacgacaggtttcccgactggaaagcgggcagtgagcgcaacgcaattaatgtgagttagctcactcattaggcaccccaggctttacactttatgcttccggctcgtatgttgtgtggaattgtgagcggataacaatttcacacaggaaacagctatgaccatgattacgccaagcttgcatgcaggcctctgcagtcgacgggcccgggatcccttaagatttaatacgactcactataggggaattgtgagcggataacaattcccggcgcgccgacttcgagcgaaggagacttgcaataactagcataaccccttggggcctctaaacgggtcttgaggggttttttgctgaaacctcagggcggagcgggcctcgtaaaaggctcgttttttttatcttaattaggcgagaagactcccacttcaacgaagcgaagcggagtaagtgggagatgaatcgccttaactatattttgctgaaaataggatagattcagtaaaatatagtatcatatagttagatgggaggtgaaaacggttaccggttaccctgcgctagcatgcctatttgtttatttttctaaatacattcaaatatgtatccgctcatgagacaataaccctgataaatgcttcaataatattgaaaaaggaagagtatgagccatattcaacgggaaacgtcttgctctaggccgcgattaaattccaacatggatgctgatttatatgggtataaatgggctcgcgataatgtcgggcaatcaggtgcgacaatctatcgattgtatgggaagcccgatgcgccagagttgtttctgaaacatggcaaaggtagcgttgccaatgatgttacagatgagatggtcagactaaactggctgacggaatttatgcctcttccgaccatcaagcattttatccgtactcctgatgatgcatggttactcaccactgcgatccccgggaaaacagcattccaggtattagaagaatatcctgattcaggtgaaaatattgttgatgcgctggcagtgttcctgcgccggttgcattcgattcctgtttgtaattgtccttttaacagcgaccgcgtatttcgtctcgctcaggcgcaatcacgaatgaataacggtttggttgatgcgagtgattttgatgacgagcgtaatggctggcctgttgaacaagtctggaaagaaatgcataaacttttgccattctcaccggattcagtcgtcactcatggtgatttctcacttgataaccttatttttgacgaggggaaattaataggttgtattgatgttggacgagtcggaatcgcagaccgataccaggatcttgccatcctatggaactgcctcggtgagttttctccttcattacagaaacggctttttcaaaaatatggtattgataatcctgatatgaataaattgcagtttcatttgatgctcgatgagtttttctaagaattaattcatgagcggatacatatttgaatgtatttagaaaaataaacaaataggggttccgcgcacatttccccgaaaagtgccacttgcggagacccacgtgtccgggagaaattaatacgactcactataggcctcgagttaagcgcggcttgtatcgaacaaagtctggcaaactaattaatgctgatgtcaatggcgcattaaacatcttaaagaaaagtaaagctgtagacctgagtgtcttatgctctagcggcgaagtggacacgcctcaaagaataaggattgcttgaagcagtcaaacttctttggaagcccccacttcaaattttcgctagaaaattaagtgggggtagttcacggacaagtggttcaccatgcgttgctttatggtatgatagtctagatgcattcgcgaggtaccgagctcgaattcactggccgtcgttttacaacgtcgtgactgggaaaaccctggcgttacccaacttaatcgccttgcagcacatccccctttcgccagctggcgtaatagcgaagaggcccgcaccgatcgcccttcccaacagttgcgcagcctgaatggcgaatggcgcctgatgcggtattttctccttacgcatctgtgcggtatttcacaccgcatatggtgcactctcagtacaatctgctctgatgccgcatagttaagccagccccgacacccgccaacacccgctgacgcgccctgacgggcttgtctgctcccggcatccgcttacagacaagctgtgaccgtctccgggagctgcatgtgtcagaggttttcaccgtcatcaccgaaacgcgcgagacgaaagggcctcgtgatacgcctatttttataggttaatgtcatgataataatggtttcttagacgtcaggtggcacttttcggggaaatgtgcgcggaacccctatttgtttatttttctaaatacattcaaatatgtatccgctcatgagacaataaccctgataaatgcttcaataatattgaaaaaggaagagtatgagtattcaacatttccgtgtcgcccttattcccttttttgcggcattttgccttcctgtttttgctcacccagaaacgctggtgaaagtaaaagatgctgaagatcagttgggtgcacgagtgggttacatcgaactggatctcaacagcggtaagatccttgagagttttcgccccgaagaacgttttccaatgatgagcacttttaaagttctgctatgtggcgcggtattatcccgtattgacgccgggcaagagcaactcggtcgccgcatacactattctcagaatgacttggttgagtactcaccagtcacagaaaagcatcttacggatggcatgacagtaagagaattatgcagtgctgccataaccatgagtgataacactgcggccaacttacttctgacaacgatcggaggaccgaaggagctaaccgcttttttgcacaacatgggggatcatgtaactcgccttgatcgttgggaaccggagctgaatgaagccataccaaacgacgagcgtgacaccacgatgcctgtagcaatggcaacaacgttgcgcaaactattaactggcgaactacttactctagcttcccggcaacaattaatagactggatggaggcggataaagttgcaggaccacttctgcgctcggcccttccggctggctggtttattgctgataaatctggagccggtgagcgtgggtctcgcggtatcattgcagcactggggccagatggtaagccctcccgtatcgtagttatctacacgacggggagtcaggcaactatggatgaacgaaatagacagatcgctgagataggtgcctcactgattaagcattggtaactgtcagaccaagtttactcatatatactttagattgatttaaaacttcatttttaatttaaaaggatctaggtgaagatcctttttgataatctcatgaccaaaatcccttaacgtgagttttcgttccactgagcgtcagaccccgtagaaaagatcaaaggatcttcttgagatcctttttttctgcgcgtaatctgctgcttgcaaacaaaaaaaccaccgctaccagcggtggtttgtttgccggatcaagagctaccaactctttttccgaaggtaactggcttcagcagagcgcagataccaaatactgttcttctagtgtagccgtagttaggccac

SEQ ID NO: 142 - DNA, 4932 bp, synthetic construct
  source 1..4932: mol_type = other DNA
gctccgccatcgccgcttccactttttcccgcgttttcgcagaaacgtggctggcctggttcaccacgcgggaaacggtctgataagagacaccggcatactctgcgacatcgtataacgttactggtttcacattcaccaccctgaattgactctcttccgggcgctatcatgccataccgcgaaaggttttgcgccattcgatggtgtccgggattgacagctagctcagtcctaggtataatgctagcgtggagatatacctcgagtttacggtcaaaccgtttacgtatcgacggattgcttaggtatgaagtcgtagatggcgagttcccgcccttgagtatcatggatactcatgttgcctgtggctcccaacgggacgggtgccaggtgttgcctgcagataggctgccaaccagcctatcatgcatccacctccgaaggggaaacaggaaacccccacttcgataagtgggggaggttcatcggtcattttcccgtgttttcgttctctgtctccagcgcactcgcggccgcaataactagcataaccccttggggcctctaaacgggtcttgaggggttttttgctgaagtcgacttttacggctagctcagtcctaggtactatgctagcgtggagatatacggtaccaaggagatataccatgggctaccgcacactgaaaactcgtttccgcgccaagaaagaagttatccagaagttgtttgaatgcaaccgtatctccgcggaggtttggaacgagtgcctgcgcttagctaaagagcatcaccttgagaccggcaagtggattactaaaacggaacttcaaaaagccacgaagggccgcttttctattcatagccagagtattcaagcggtagttcataagtacattttcgcgcgcgatggggctaaagaggcccgtaagaaaggagaaaaaatcaagtatccatacaaaaaaaagaagcacttcaatactaagtgggctaaagatggcttcgtgttgcatgaagacggaacgcttgaattgtcgttaggaatctggaatcgtaagcgtcaatcgcctttggtggtgaaaatcgataaagagaagttaccaaacggcaaagtaaaagaaattgagttggtctatgaccgcgggttgtggttatgcttgagctatgaagacggcaaaaaacctaaagaaaacccttgtaagaatcgcgtagcaatcgacccaggagagatccacacgattgcagcgatctgtgagaatggcgaatcgctgattattactggtcgtaaaatccgctcgattcaccgccttcgtaacaagaaacttaaagaattgcagaagttgatgtcgcgctgtaagaaggggagtaagcagtggaaaaaatataaccgtgccaagcagtatgttttatcaaaatcggaagcccagcttaaagatgctttgcacaaaacgacccgccaattcgttcgctggtgtctggagaatcaagtcaaggaggtggtaattggtgacatcgagggtattcagcgtaatactaagaagaagcgcaacaagaaaacgaatcaaaagctgagtaattggtcgttcggtaagctgtttgattatctgaagtataagttaaatgccgaggggatccagattgaaaaaaaggacgaatcgtacacctcacaaacctgcccggtctgcggaaagaagaacaagtcgagttcacgcaactacacctgtcagtgtgggtataaacgtcaccgtgatatccacggggccatgaatttattcgcaaaggtctattacggggagattcgcccccttgagtttaccgttaaaccgttcacttaccgtcgtatcgcgtaataagagctcctgctgccaccgctgagcaataactagcataaccccttggggcctctaaacgggtcttgaggggttttttgctgaaacctcaggcatttgagaagcacacggtcacactgcttccggtagtcaataaaccggtaaaccagcaatagacataagcggctatttaacgaccctgccctgaaccgacgaccgggtcatcgtggccggatcttgcggcccctcggcttgaacgaattgttagacattatttgccgactaccttggtgatctcgcctttcacgtagtggacaaattcttccaactgatctgcgcgcgaggccaagcgatcttcttcttgtccaagataagcctgtctagcttcaagtatgacgggctgatactgggccggcaggcgctccattgcccagtcggcagcgacatccttcggcgcgattttgccggttactgcgctgtaccaaatgcgggacaacgtaagcactacatttcgctcatcgccagcccagtcgggcggcgagttccatagcgttaaggtttcatttagcgcctcaaatagatcctgttcaggaaccggatcaaagagttcctccgccgctggacctaccaaggcaacgctatgttctcttgcttttgtcagcaagatagccagatcaatgtcgatcgtggctggctcgaagatacctgcaagaatgtcattgcgctgccattctccaaattgcagttcgcgcttagctggataacgccacggaatgatgtcgtcgtgcacaacaatggtgacttctacagcgcggagaatctcgctctctccaggggaagccgaagtttccaaaaggtcgttgatcaaagctcgccgcgttgtttcatcaagccttacggtcaccgtaaccagcaaatcaatatcactgtgtggcttcaggccgccatccactgcggagccgtacaaatgtacggccagcaacgtcggttcgagatggcgctcgatgacgccaactacctctgatagttgagtcgatacttcggcgatcaccgcttccctcatactcttcctttttcaatattattgaagcatttatcagggttattgtctcatgagcggatacatatttgaatgtatttagaaaaataaacaaatagctagctcactcggtcgctacgctccgggcgtgagactgcggcgggcgctgcggacacatacaaagttacccacagattccgtggataagcaggggactaacatgtgaggcaaaacagcagggccgcgccggtggcgtttttccataggctccgccctcctgccagagttcacataaacagacgcttttccggtgcatctgtgggagccgtgaggctcaaccatgaatctgacagtacgggcgaaacccgacaggacttaaagatccccaccgtttccggcgggtcgctccctcttgcgctctcctgttccgaccctgccgtttaccggatacctgttccgcctttctcccttacgggaagtgtggcgctttctcatagctcacacactggtatctcggctcggtgtaggtcgttcgctccaagctgggctgtaagcaagaactccccgttcagcccgactgctgcgccttatccggtaactgttcacttgagtccaacccggaaaagcacggtaaaacgccactggcagcagccattggtaactgggagttcgcagaggatttgtttagctaaacacgcggttgctcttgaagtgtgcgccaaagtccggctacactggaaggacagatttggttgctgtgctctgcgaaagccagttaccacggttaagcagttccccaactgacttaaccttcgatcaaaccacctccccaggtggttttttcgtttacagggcaaaagattacgcgcagaaaaaaaggatctcaagaagatcctttgatcttttctactgaaccgctctagatttcagtgcaatttatctcttcaaatgtagcacctgaagtcagccccatacgatataagttgtaattctcatgttagtcatgccccgcgcccaccggaaggagctgactgggttgaaggctctcaagggcatcggtcgagatcccggtgcctaatgagtgagctaacttacattaattgcgttgcgctcactgcccgctttccagtcgggaaacctgtcgtgccagctgcattaatgaatcggccaacgcgcggggagaggcggtttgcgtattgggcgccagggtggtttttcttttcaccagtgagacgggcaacagctgattgcccttcaccgcctggccctgagagagttgcagcaagcggtccacgctggtttgccccagcaggcgaaaatcctgtttgatggtggttaacggcgggatataacatgagctgtcttcggtatcgtcgtatcccactaccgagatgtccgcaccaacgcgcagcccggactcggtaatggcgcgcattgcgcccagcgccatctgatcgttggcaaccagcatcgcagtgggaacgatgccctcattcagcatttgcatggtttgttgaaaaccggacatggcactccagtcgccttcccgttccgctatcggctgaatttgattgcgagtgagatatttatgccagccagccagacgcagacgcgccgagacagaacttaatgggcccgctaacagcgcgatttgctggtgacccaatgcgaccagatgctccacgcccagtcgcgtaccgtcttcatgggagaaaataatactgttgatgggtgtctggtcagagacatcaagaaataacgccggaacattagtgcaggcagcttccacagcaatggcatcctggtcatccagcggatagttaatgatcagcccactgacgcgttgcgcgagaagattgtgcaccgccgctttacaggcttcgacgccgcttcgttctaccatcgacaccaccacgctggcacccagttgatcggcgcgagatttaatcgccgcgacaatttgcgacggcgcgtgcagggccagactggaggtggcaacgccaatcagcaacgactgtttgcccgccagttgttgtgccacgcggttgggaatgtaattca

SEQ ID NO: 143 - DNA, 1955 bp, synthetic construct
  source 1..1955: mol_type = other DNA
tttgtttatttttctaaatacattcaaatatgtatccgctcatgagacaataaccctgataaatgcttcaataatattgaaaaaggaagagtatgagccatattcaacgggaaacgtcttgctctaggccgcgattaaattccaacatggatgctgatttatatgggtataaatgggctcgcgataatgtcgggcaatcaggtgcgacaatctatcgattgtatgggaagcccgatgcgccagagttgtttctgaaacatggcaaaggtagcgttgccaatgatgttacagatgagatggtcagactaaactggctgacggaatttatgcctcttccgaccatcaagcattttatccgtactcctgatgatgcatggttactcaccactgcgatccccgggaaaacagcattccaggtattagaagaatatcctgattcaggtgaaaatattgttgatgcgctggcagtgttcctgcgccggttgcattcgattcctgtttgtaattgtccttttaacagcgaccgcgtatttcgtctcgctcaggcgcaatcacgaatgaataacggtttggttgatgcgagtgattttgatgacgagcgtaatggctggcctgttgaacaagtctggaaagaaatgcataaacttttgccattctcaccggattcagtcgtcactcatggtgatttctcacttgataaccttatttttgacgaggggaaattaataggttgtattgatgttggacgagtcggaatcgcagaccgataccaggatcttgccatcctatggaactgcctcggtgagttttctccttcattacagaaacggctttttcaaaaatatggtattgataatcctgatatgaataaattgcagtttcatttgatgctcgatgagtttttctaagaattaattcatgagcggatacatatttgaatgtatttagaaaaataaacaaataggggttccgcgcacatttccccgaaaagtgccacttgcggagacccggtcgtcagcttgtcgtcggttcagggcagggtcgttaaatagccgcttatgtctattgctggtttaccggtttaagctgatcgaaaagcatgaactgccttctgtgtactgggaagttagctcactcattaggcaccgggatctcgaccgatgcccttgagagccttcaacccagtcagctccttccggtgggcgcggggcatgactaacatgagaattacaacttatatcgtatggggctgacttcaggtgctacatttgaagagataaattgcactgaaatctagagtgatggtgtcgggaatccgtaaaggatcttcttgagatccttttacgatcgtcgtaatctcctgctctgtaaacgaaaaaaccgcctggggaggcggtttgatcgaaggttaagtcagttggggaactgcttaacctggtaactggctttagtggagcgcagataccaaatactgtcctttcagtgtagcctctgttaggccaccacttcaagactctcgatatctaaatccactaattctcagttaccaatggctgctgccagtggcgttttgtcgtgtctttccgggttggactcaagatgatagttaccggataaggcgcagcagtcgggctgaacggggggttcttgcacacagcccagcttggagcgaactgtctacacggaacgggacgtggtgatttgggtaaagcctccaccacaacacggacgccgcaggacgggaacaggagagcgcaagagggagccatcagggggaaacgcctggtatctttatagtcctgtcgggtttcgccaccactgatttgagcgtcagatttcgtgatgttcgtcaggggggcggagcctatggaaaaacggcttcgctccggccttattgtctctctgctaagtatcctcctggcatcttctaggacgtttctgcgctagcatgccta

SEQ ID NO: 144 - DNA, 1957 bp, synthetic construct
  source 1..1957: mol_type = other DNA
tttgtttatttttctaaatacattcaaatatgtatccgctcatgagacaataaccctgataaatgcttcaataatattgaaaaaggaagagtatgagccatattcaacgggaaacgtcttgctctaggccgcgattaaattccaacatggatgctgatttatatgggtataaatgggctcgcgataatgtcgggcaatcaggtgcgacaatctatcgattgtatgggaagcccgatgcgccagagttgtttctgaaacatggcaaaggtagcgttgccaatgatgttacagatgagatggtcagactaaactggctgacggaatttatgcctcttccgaccatcaagcattttatccgtactcctgatgatgcatggttactcaccactgcgatccccgggaaaacagcattccaggtattagaagaatatcctgattcaggtgaaaatattgttgatgcgctggcagtgttcctgcgccggttgcattcgattcctgtttgtaattgtccttttaacagcgaccgcgtatttcgtctcgctcaggcgcaatcacgaatgaataacggtttggttgatgcgagtgattttgatgacgagcgtaatggctggcctgttgaacaagtctggaaagaaatgcataaacttttgccattctcaccggattcagtcgtcactcatggtgatttctcacttgataaccttatttttgacgaggggaaattaataggttgtattgatgttggacgagtcggaatcgcagaccgataccaggatcttgccatcctatggaactgcctcggtgagttttctccttcattacagaaacggctttttcaaaaatatggtattgataatcctgatatgaataaattgcagtttcatttgatgctcgatgagtttttctaagaattaattcatgagcggatacatatttgaatgtatttagaaaaataaacaaataggggttccgcgcacatttccccgaaaagtgccacttgcggagacccggtcgtcagcttgtcgtcggttcagggcagggtcgttaaatagccgcttatgtctattgctggtttaccggtttttatggacaagtggttcaccatgcgttgctttatggtatgataggttagctcactcattaggcaccgggatctcgaccgatgcccttgagagccttcaacccagtcagctccttccggtgggcgcggggcatgactaacatgagaattacaacttatatcgtatggggctgacttcaggtgctacatttgaagagataaattgcactgaaatctagagtgatggtgtcgggaatccgtaaaggatcttcttgagatccttttacgatcgtcgtaatctcctgctctgtaaacgaaaaaaccgcctggggaggcggtttgatcgaaggttaagtcagttggggaactgcttaacctggtaactggctttagtggagcgcagataccaaatactgtcctttcagtgtagcctctgttaggccaccacttcaagactctcgatatctaaatccactaattctcagttaccaatggctgctgccagtggcgttttgtcgtgtctttccgggttggactcaagatgatagttaccggataaggcgcagcagtcgggctgaacggggggttcttgcacacagcccagcttggagcgaactgtctacacggaacgggacgtggtgatttgggtaaagcctccaccacaacacggacgccgcaggacgggaacaggagagcgcaagagggagccatcagggggaaacgcctggtatctttatagtcctgtcgggtttcgccaccactgatttgagcgtcagatttcgtgatgttcgtcaggggggcggagcctatggaaaaacggcttcgctccggccttattgtctctctgctaagtatcctcctggcatcttctaggacgtttctgcgctagcatgccta

SEQ ID NO: 145 - DNA, 1957 bp, synthetic construct
  source 1..1957: mol_type = other DNA
tattgatgttggacgagtcggaatcgcagaccgataccaggatcttgccatcctatggaactgcctcggtgagttttctccttcattacagaaacggctttttcaaaaatatggtattgataatcctgatatgaataaattgcagtttcatttgatgctcgatgagtttttctaagaattaattcatgagcggatacatatttgaatgtatttagaaaaataaacaaataggggttccgcgcacatttccccgaaaagtgccacttgcggagacccggtcgtcagcttgtcgtcggttcagggcagggtcgttaaatagccgcttatgtctattgctggtttaccggtttttaacggtcattttcccgtgttttcgttctctgtctccagcgcagttagctcactcattaggcaccgggatctcgaccgatgcccttgagagccttcaacccagtcagctccttccggtgggcgcggggcatgactaacatgagaattacaacttatatcgtatggggctgacttcaggtgctacatttgaagagataaattgcactgaaatctagagtgatggtgtcgggaatccgtaaaggatcttcttgagatccttttacgatcgtcgtaatctcctgctctgtaaacgaaaaaaccgcctggggaggcggtttgatcgaaggttaagtcagttggggaactgcttaacctggtaactggctttagtggagcgcagataccaaatactgtcctttcagtgtagcctctgttaggccaccacttcaagactctcgatatctaaatccactaattctcagttaccaatggctgctgccagtggcgttttgtcgtgtctttccgggttggactcaagatgatagttaccggataaggcgcagcagtcgggctgaacggggggttcttgcacacagcccagcttggagcgaactgtctacacggaacgggacgtggtgatttgggtaaagcctccaccacaacacggacgccgcaggacgggaacaggagagcgcaagagggagccatcagggggaaacgcctggtatctttatagtcctgtcgggtttcgccaccactgatttgagcgtcagatttcgtgatgttcgtcaggggggcggagcctatggaaaaacggcttcgctccggccttattgtctctctgctaagtatcctcctggcatcttctaggacgtttctgcgctagcatgcctatttgtttatttttctaaatacattcaaatatgtatccgctcatgagacaataaccctgataaatgcttcaataatattgaaaaaggaagagtatgagccatattcaacgggaaacgtcttgctctaggccgcgattaaattccaacatggatgctgatttatatgggtataaatgggctcgcgataatgtcgggcaatcaggtgcgacaatctatcgattgtatgggaagcccgatgcgccagagttgtttctgaaacatggcaaaggtagcgttgccaatgatgttacagatgagatggtcagactaaactggctgacggaatttatgcctcttccgaccatcaagcattttatccgtactcctgatgatgcatggttactcaccactgcgatccccgggaaaacagcattccaggtattagaagaatatcctgattcaggtgaaaatattgttgatgcgctggcagtgttcctgcgccggttgcattcgattcctgtttgtaattgtccttttaacagcgaccgcgtatttcgtctcgctcaggcgcaatcacgaatgaataacggtttggttgatgcgagtgattttgatgacgagcgtaatggctggcctgttgaacaagtctggaaagaaatgcataaacttttgccattctcaccggattcagtcgtcactcatggtgatttctcacttgataaccttatttttgacgaggggaaattaataggttg

SEQ ID NO: 146 - DNA, 1957 bp, synthetic construct
  source 1..1957: mol_type = other DNA
gatgttggacgagtcggaatcgcagaccgataccaggatcttgccatcctatggaactgcctcggtgagttttctccttcattacagaaacggctttttcaaaaatatggtattgataatcctgatatgaataaattgcagtttcatttgatgctcgatgagtttttctaagaattaattcatgagcggatacatatttgaatgtatttagaaaaataaacaaataggggttccgcgcacatttccccgaaaagtgccacttgcggagacccggtcgtcagcttgtcgtcggttcagggcagggtcgttaaatagccgcttatgtctattgctggtttaccggttttcatcgcccctcttgtttgttgtgcaaattggtccggttccttagttagctcactcattaggcaccgggatctcgaccgatgcccttgagagccttcaacccagtcagctccttccggtgggcgcggggcatgactaacatgagaattacaacttatatcgtatggggctgacttcaggtgctacatttgaagagataaattgcactgaaatctagagtgatggtgtcgggaatccgtaaaggatcttcttgagatccttttacgatcgtcgtaatctcctgctctgtaaacgaaaaaaccgcctggggaggcggtttgatcgaaggttaagtcagttggggaactgcttaacctggtaactggctttagtggagcgcagataccaaatactgtcctttcagtgtagcctctgttaggccaccacttcaagactctcgatatctaaatccactaattctcagttaccaatggctgctgccagtggcgttttgtcgtgtctttccgggttggactcaagatgatagttaccggataaggcgcagcagtcgggctgaacggggggttcttgcacacagcccagcttggagcgaactgtctacacggaacgggacgtggtgatttgggtaaagcctccaccacaacacggacgccgcaggacgggaacaggagagcgcaagagggagccatcagggggaaacgcctggtatctttatagtcctgtcgggtttcgccaccactgatttgagcgtcagatttcgtgatgttcgtcaggggggcggagcctatggaaaaacggcttcgctccggccttattgtctctctgctaagtatcctcctggcatcttctaggacgtttctgcgctagcatgcctatttgtttatttttctaaatacattcaaatatgtatccgctcatgagacaataaccctgataaatgcttcaataatattgaaaaaggaagagtatgagccatattcaacgggaaacgtcttgctctaggccgcgattaaattccaacatggatgctgatttatatgggtataaatgggctcgcgataatgtcgggcaatcaggtgcgacaatctatcgattgtatgggaagcccgatgcgccagagttgtttctgaaacatggcaaaggtagcgttgccaatgatgttacagatgagatggtcagactaaactggctgacggaatttatgcctcttccgaccatcaagcattttatccgtactcctgatgatgcatggttactcaccactgcgatccccgggaaaacagcattccaggtattagaagaatatcctgattcaggtgaaaatattgttgatgcgctggcagtgttcctgcgccggttgcattcgattcctgtttgtaattgtccttttaacagcgaccgcgtatttcgtctcgctcaggcgcaatcacgaatgaataacggtttggttgatgcgagtgattttgatgacgagcgtaatggctggcctgttgaacaagtctggaaagaaatgcataaacttttgccattctcaccggattcagtcgtcactcatggtgatttctcacttgataaccttatttttgacgaggggaaattaataggttgtatt

SEQ ID NO: 147 - DNA, 1956 bp, synthetic construct
  source 1..1956: mol_type = other DNA
tttgtttatttttctaaatacattcaaatatgtatccgctcatgagacaataaccctgataaatgcttcaataatattgaaaaaggaagagtatgagccatattcaacgggaaacgtcttgctctaggccgcgattaaattccaacatggatgctgatttatatgggtataaatgggctcgcgataatgtcgggcaatcaggtgcgacaatctatcgattgtatgggaagcccgatgcgccagagttgtttctgaaacatggcaaaggtagcgttgccaatgatgttacagatgagatggtcagactaaactggctgacggaatttatgcctcttccgaccatcaagcattttatccgtactcctgatgatgcatggttactcaccactgcgatccccgggaaaacagcattccaggtattagaagaatatcctgattcaggtgaaaatattgttgatgcgctggcagtgttcctgcgccggttgcattcgattcctgtttgtaattgtccttttaacagcgaccgcgtatttcgtctcgctcaggcgcaatcacgaatgaataacggtttggttgatgcgagtgattttgatgacgagcgtaatggctggcctgttgaacaagtctggaaagaaatgcataaacttttgccattctcaccggattcagtcgtcactcatggtgatttctcacttgataaccttatttttgacgaggggaaattaataggttgtattgatgttggacgagtcggaatcgcagaccgataccaggatcttgccatcctatggaactgcctcggtgagttttctccttcattacagaaacggctttttcaaaaatatggtattgataatcctgatatgaataaattgcagtttcatttgatgctcgatgagtttttctaagaattaattcatgagcggatacatatttgaatgtatttagaaaaataaacaaataggggttccgcgcacatttccccgaaaagtgccacttgcggagacccggtcgtcagcttgtcgtcggttcagggcagggtcgttaaatagccgcttatgtctattgctggtttaccggtgcggagccgttgcaacaagggcgcttgtgtgtagggaagatgaaagttagctcactcattaggcaccgggatctcgaccgatgcccttgagagccttcaacccagtcagctccttccggtgggcgcggggcatgactaacatgagaattacaacttatatcgtatggggctgacttcaggtgctacatttgaagagataaattgcactgaaatctagagtgatggtgtcgggaatccgtaaaggatcttcttgagatccttttacgatcgtcgtaatctcctgctctgtaaacgaaaaaaccgcctggggaggcggtttgatcgaaggttaagtcagttggggaactgcttaacctggtaactggctttagtggagcgcagataccaaatactgtcctttcagtgtagcctctgttaggccaccacttcaagactctcgatatctaaatccactaattctcagttaccaatggctgctgccagtggcgttttgtcgtgtctttccgggttggactcaagatgatagttaccggataaggcgcagcagtcgggctgaacggggggttcttgcacacagcccagcttggagcgaactgtctacacggaacgggacgtggtgatttgggtaaagcctccaccacaacacggacgccgcaggacgggaacaggagagcgcaagagggagccatcagggggaaacgcctggtatctttatagtcctgtcgggtttcgccaccactgatttgagcgtcagatttcgtgatgttcgtcaggggggcggagcctatggaaaaacggcttcgctccggccttattgtctctctgctaagtatcctcctggcatcttctaggacgtttctgcgctagcatgccta

SEQ ID NO: 148 - DNA, 1957 bp, synthetic construct
  source 1..1957: mol_type = other DNA
tttgtttatttttctaaatacattcaaatatgtatccgctcatgagacaataaccctgataaatgcttcaataatattgaaaaaggaagagtatgagccatattcaacgggaaacgtcttgctctaggccgcgattaaattccaacatggatgctgatttatatgggtataaatgggctcgcgataatgtcgggcaatcaggtgcgacaatctatcgattgtatgggaagcccgatgcgccagagttgtttctgaaacatggcaaaggtagcgttgccaatgatgttacagatgagatggtcagactaaactggctgacggaatttatgcctcttccgaccatcaagcattttatccgtactcctgatgatgcatggttactcaccactgcgatccccgggaaaacagcattccaggtattagaagaatatcctgattcaggtgaaaatattgttgatgcgctggcagtgttcctgcgccggttgcattcgattcctgtttgtaattgtccttttaacagcgaccgcgtatttcgtctcgctcaggcgcaatcacgaatgaataacggtttggttgatgcgagtgattttgatgacgagcgtaatggctggcctgttgaacaagtctggaaagaaatgcataaacttttgccattctcaccggattcagtcgtcactcatggtgatttctcacttgataaccttatttttgacgaggggaaattaataggttgtattgatgttggacgagtcggaatcgcagaccgataccaggatcttgccatcctatggaactgcctcggtgagttttctccttcattacagaaacggctttttcaaaaatatggtattgataatcctgatatgaataaattgcagtttcatttgatgctcgatgagtttttctaagaattaattcatgagcggatacatatttgaatgtatttagaaaaataaacaaataggggttccgcgcacatttccccgaaaagtgccacttgcggagacccggtcgtcagcttgtcgtcggttcagggcagggtcgttaaatagccgcttatgtctattgctggtttaccggttgggcgggacaagtggttcaccatgcgttgctttatggtatgataggttagctcactcattaggcaccgggatctcgaccgatgcccttgagagccttcaacccagtcagctccttccggtgggcgcggggcatgactaacatgagaattacaacttatatcgtatggggctgacttcaggtgctacatttgaagagataaattgcactgaaatctagagtgatggtgtcgggaatccgtaaaggatcttcttgagatccttttacgatcgtcgtaatctcctgctctgtaaacgaaaaaaccgcctggggaggcggtttgatcgaaggttaagtcagttggggaactgcttaacctggtaactggctttagtggagcgcagataccaaatactgtcctttcagtgtagcctctgttaggccaccacttcaagactctcgatatctaaatccactaattctcagttaccaatggctgctgccagtggcgttttgtcgtgtctttccgggttggactcaagatgatagttaccggataaggcgcagcagtcgggctgaacggggggttcttgcacacagcccagcttggagcgaactgtctacacggaacgggacgtggtgatttgggtaaagcctccaccacaacacggacgccgcaggacgggaacaggagagcgcaagagggagccatcagggggaaacgcctggtatctttatagtcctgtcgggtttcgccaccactgatttgagcgtcagatttcgtgatgttcgtcaggggggcggagcctatggaaaaacggcttcgctccggccttattgtctctctgctaagtatcctcctggcatcttctaggacgtttctgcgctagcatgccta

SEQ ID NO: 149 - DNA, 1957 bp, synthetic construct
  source 1..1957: mol_type = other DNA
tttgtttatttttctaaatacattcaaatatgtatccgctcatgagacaataaccctgataaatgcttcaataatattgaaaaaggaagagtatgagccatattcaacgggaaacgtcttgctctaggccgcgattaaattccaacatggatgctgatttatatgggtataaatgggctcgcgataatgtcgggcaatcaggtgcgacaatctatcgattgtatgggaagcccgatgcgccagagttgtttctgaaacatggcaaaggtagcgttgccaatgatgttacagatgagatggtcagactaaactggctgacggaatttatgcctcttccgaccatcaagcattttatccgtactcctgatgatgcatggttactcaccactgcgatccccgggaaaacagcattccaggtattagaagaatatcctgattcaggtgaaaatattgttgatgcgctggcagtgttcctgcgccggttgcattcgattcctgtttgtaattgtccttttaacagcgaccgcgtatttcgtctcgctcaggcgcaatcacgaatgaataacggtttggttgatgcgagtgattttgatgacgagcgtaatggctggcctgttgaacaagtctggaaagaaatgcataaacttttgccattctcaccggattcagtcgtcactcatggtgatttctcacttgataaccttatttttgacgaggggaaattaataggttgtattgatgttggacgagtcggaatcgcagaccgataccaggatcttgccatcctatggaactgcctcggtgagttttctccttcattacagaaacggctttttcaaaaatatggtattgataatcctgatatgaataaattgcagtttcatttgatgctcgatgagtttttctaagaattaattcatgagcggatacatatttgaatgtatttagaaaaataaacaaataggggttccgcgcacatttccccgaaaagtgccacttgcggagacccggtcgtcagcttgtcgtcggttcagggcagggtcgttaaatagccgcttatgtctattgctggtttaccggttttcacggacaagtggttcaccatgcgttgctttatggtatgataggttagctcactcattaggcaccgggatctcgaccgatgcccttgagagccttcaacccagtcagctccttccggtgggcgcggggcatgactaacatgagaattacaacttatatcgtatggggctgacttcaggtgctacatttgaagagataaattgcactgaaatctagagtgatggtgtcgggaatccgtaaaggatcttcttgagatccttttacgatcgtcgtaatctcctgctctgtaaacgaaaaaaccgcctggggaggcggtttgatcgaaggttaagtcagttggggaactgcttaacctggtaactggctttagtggagcgcagataccaaatactgtcctttcagtgtagcctctgttaggccaccacttcaagactctcgatatctaaatccactaattctcagttaccaatggctgctgccagtggcgttttgtcgtgtctttccgggttggactcaagatgatagttaccggataaggcgcagcagtcgggctgaacggggggttcttgcacacagcccagcttggagcgaactgtctacacggaacgggacgtggtgatttgggtaaagcctccaccacaacacggacgccgcaggacgggaacaggagagcgcaagagggagccatcagggggaaacgcctggtatctttatagtcctgtcgggtttcgccaccactgatttgagcgtcagatttcgtgatgttcgtcaggggggcggagcctatggaaaaacggcttcgctccggccttattgtctctctgctaagtatcctcctggcatcttctaggacgtttctgcgctagcatgccta

SEQ ID NO: 150 - DNA, 1957 bp, synthetic construct
  source 1..1957: mol_type = other DNA
tttgtttatttttctaaatacattcaaatatgtatccgctcatgagacaataaccctgataaatgcttcaataatattgaaaaaggaagagtatgagccatattcaacgggaaacgtcttgctctaggccgcgattaaattccaacatggatgctgatttatatgggtataaatgggctcgcgataatgtcgggcaatcaggtgcgacaatctatcgattgtatgggaagcccgatgcgccagagttgtttctgaaacatggcaaaggtagcgttgccaatgatgttacagatgagatggtcagactaaactggctgacggaatttatgcctcttccgaccatcaagcattttatccgtactcctgatgatgcatggttactcaccactgcgatccccgggaaaacagcattccaggtattagaagaatatcctgattcaggtgaaaatattgttgatgcgctggcagtgttcctgcgccggttgcattcgattcctgtttgtaattgtccttttaacagcgaccgcgtatttcgtctcgctcaggcgcaatcacgaatgaataacggtttggttgatgcgagtgattttgatgacgagcgtaatggctggcctgttgaacaagtctggaaagaaatgcataaacttttgccattctcaccggattcagtcgtcactcatggtgatttctcacttgataaccttatttttgacgaggggaaattaataggttgtattgatgttggacgagtcggaatcgcagaccgataccaggatcttgccatcctatggaactgcctcggtgagttttctccttcattacagaaacggctttttcaaaaatatggtattgataatcctgatatgaataaattgcagtttcatttgatgctcgatgagtttttctaagaattaattcatgagcggatacatatttgaatgtatttagaaaaataaacaaataggggttccgcgcacatttccccgaaaagtgccacttgcggagacccggtcgtcagcttgtcgtcggttcagggcagggtcgttaaatagccgcttatgtctattgctggtttaccggttttcatggacaagtggttcaccatgcgttgctttatggtatgataggttagctcactcattaggcaccgggatctcgaccgatgcccttgagagccttcaacccagtcagctccttccggtgggcgcggggcatgactaacatgagaattacaacttatatcgtatggggctgacttcaggtgctacatttgaagagataaattgcactgaaatctagagtgatggtgtcgggaatccgtaaaggatcttcttgagatccttttacgatcgtcgtaatctcctgctctgtaaacgaaaaaaccgcctggggaggcggtttgatcgaaggttaagtcagttggggaactgcttaacctggtaactggctttagtggagcgcagataccaaatactgtcctttcagtgtagcctctgttaggccaccacttcaagactctcgatatctaaatccactaattctcagttaccaatggctgctgccagtggcgttttgtcgtgtctttccgggttggactcaagatgatagttaccggataaggcgcagcagtcgggctgaacggggggttcttgcacacagcccagcttggagcgaactgtctacacggaacgggacgtggtgatttgggtaaagcctccaccacaacacggacgccgcaggacgggaacaggagagcgcaagagggagccatcagggggaaacgcctggtatctttatagtcctgtcgggtttcgccaccactgatttgagcgtcagatttcgtgatgttcgtcaggggggcggagcctatggaaaaacggcttcgctccggccttattgtctctctgctaagtatcctcctggcatcttctaggacgtttctgcgctagcatgccta

SEQ ID NO: 151 - DNA, 1957 bp, synthetic construct
  source 1..1957: mol_type = other DNA
tttgtttatttttctaaatacattcaaatatgtatccgctcatgagacaataaccctgataaatgcttcaataatattgaaaaaggaagagtatgagccatattcaacgggaaacgtcttgctctaggccgcgattaaattccaacatggatgctgatttatatgggtataaatgggctcgcgataatgtcgggcaatcaggtgcgacaatctatcgattgtatgggaagcccgatgcgccagagttgtttctgaaacatggcaaaggtagcgttgccaatgatgttacagatgagatggtcagactaaactggctgacggaatttatgcctcttccgaccatcaagcattttatccgtactcctgatgatgcatggttactcaccactgcgatccccgggaaaacagcattccaggtattagaagaatatcctgattcaggtgaaaatattgttgatgcgctggcagtgttcctgcgccggttgcattcgattcctgtttgtaattgtccttttaacagcgaccgcgtatttcgtctcgctcaggcgcaatcacgaatgaataacggtttggttgatgcgagtgattttgatgacgagcgtaatggctggcctgttgaacaagtctggaaagaaatgcataaacttttgccattctcaccggattcagtcgtcactcatggtgatttctcacttgataaccttatttttgacgaggggaaattaataggttgtattgatgttggacgagtcggaatcgcagaccgataccaggatcttgccatcctatggaactgcctcggtgagttttctccttcattacagaaacggctttttcaaaaatatggtattgataatcctgatatgaataaattgcagtttcatttgatgctcgatgagtttttctaagaattaattcatgagcggatacatatttgaatgtatttagaaaaataaacaaataggggttccgcgcacatttccccgaaaagtgccacttgcggagacccggtcgtcagcttgtcgtcggttcagggcagggtcgttaaatagccgcttatgtctattgctggtttaccggtttttacggacaagtggttcaccatgcgttgctttatggtatgataggttagctcactcattaggcaccgggatctcgaccgatgcccttgagagccttcaacccagtcagctccttccggtgggcgcggggcatgactaacatgagaattacaacttatatcgtatggggctgacttcaggtgctacatttgaagagataaattgcactgaaatctagagtgatggtgtcgggaatccgtaaaggatcttcttgagatccttttacgatcgtcgtaatctcctgctctgtaaacgaaaaaaccgcctggggaggcggtttgatcgaaggttaagtcagttggggaactgcttaacctggtaactggctttagtggagcgcagataccaaatactgtcctttcagtgtagcctctgttaggccaccacttcaagactctcgatatctaaatccactaattctcagttaccaatggctgctgccagtggcgttttgtcgtgtctttccgggttggactcaagatgatagttaccggataaggcgcagcagtcgggctgaacggggggttcttgcacacagcccagcttggagcgaactgtctacacggaacgggacgtggtgatttgggtaaagcctccaccacaacacggacgccgcaggacgggaacaggagagcgcaagagggagccatcagggggaaacgcctggtatctttatagtcctgtcgggtttcgccaccactgatttgagcgtcagatttcgtgatgttcgtcaggggggcggagcctatggaaaaacggcttcgctccggccttattgtctctctgctaagtatcctcctggcatcttctaggacgtttctgcgctagcatgccta

SEQ ID NO: 152 - DNA, 1956 bp, synthetic construct
  source 1..1956: mol_type = other DNA
taggcatgctagcgcagaaacgtcctagaagatgccaggaggatacttagcagagagacaataaggccggagcgaagccgtttttccataggctccgcccccctgacgaacatcacgaaatctgacgctcaaatcagtggtggcgaaacccgacaggactataaagataccaggcgtttccccctgatggctccctcttgcgctctcctgttcccgtcctgcggcgtccgtgttgtggtggaggctttacccaaatcaccacgtcccgttccgtgtagacagttcgctccaagctgggctgtgtgcaagaaccccccgttcagcccgactgctgcgccttatccggtaactatcatcttgagtccaacccggaaagacacgacaaaacgccactggcagcagccattggtaactgagaattagtggatttagatatcgagagtcttgaagtggtggcctaacagaggctacactgaaaggacagtatttggtatctgcgctccactaaagccagttaccaggttaagcagttccccaactgacttaaccttcgatcaaaccgcctccccaggcggttttttcgtttacagagcaggagattacgacgatcgtaaaaggatctcaagaagatcctttacggattcccgacaccatcactctagatttcagtgcaatttatctcttcaaatgtagcacctgaagtcagccccatacgatataagttgtaattctcatgttagtcatgccccgcgcccaccggaaggagctgactgggttgaaggctctcaagggcatcggtcgagatcccggtgcctaatgagtgagctaactgggcgcttccctacacacaagcgcccttgttgcaacggctccgcaccggtaaaccagcaatagacataagcggctatttaacgaccctgccctgaaccgacgacaagctgacgaccgggtctccgcaagtggcacttttcggggaaatgtgcgcggaacccctatttgtttatttttctaaatacattcaaatatgtatccgctcatgaattaattcttagaaaaactcatcgagcatcaaatgaaactgcaatttattcatatcaggattatcaataccatatttttgaaaaagccgtttctgtaatgaaggagaaaactcaccgaggcagttccataggatggcaagatcctggtatcggtctgcgattccgactcgtccaacatcaatacaacctattaatttcccctcgtcaaaaataaggttatcaagtgagaaatcaccatgagtgacgactgaatccggtgagaatggcaaaagtttatgcatttctttccagacttgttcaacaggccagccattacgctcgtcatcaaaatcactcgcatcaaccaaaccgttattcattcgtgattgcgcctgagcgagacgaaatacgcggtcgctgttaaaaggacaattacaaacaggaatcgaatgcaaccggcgcaggaacactgccagcgcatcaacaatattttcacctgaatcaggatattcttctaatacctggaatgctgttttcccggggatcgcagtggtgagtaaccatgcatcatcaggagtacggataaaatgcttgatggtcggaagaggcataaattccgtcagccagtttagtctgaccatctcatctgtaacatcattggcaacgctacctttgccatgtttcagaaacaactctggcgcatcgggcttcccatacaatcgatagattgtcgcacctgattgcccgacattatcgcgagcccatttatacccatataaatcagcatccatgttggaatttaatcgcggcctagagcaagacgtttcccgttgaatatggctcatactcttcctttttcaatattattgaagcatttatcagggttattgtctcatgagcggatacatatttgaatgtatttagaaaaataaacaaa

SEQ ID NO: 153 - DNA, 1956 bp, synthetic construct
  source 1..1956: mol_type = other DNA
taggcatgctagcgcagaaacgtcctagaagatgccaggaggatacttagcagagagacaataaggccggagcgaagccgtttttccataggctccgcccccctgacgaacatcacgaaatctgacgctcaaatcagtggtggcgaaacccgacaggactataaagataccaggcgtttccccctgatggctccctcttgcgctctcctgttcccgtcctgcggcgtccgtgttgtggtggaggctttacccaaatcaccacgtcccgttccgtgtagacagttcgctccaagctgggctgtgtgcaagaaccccccgttcagcccgactgctgcgccttatccggtaactatcatcttgagtccaacccggaaagacacgacaaaacgccactggcagcagccattggtaactgagaattagtggatttagatatcgagagtcttgaagtggtggcctaacagaggctacactgaaaggacagtatttggtatctgcgctccactaaagccagttaccaggttaagcagttccccaactgacttaaccttcgatcaaaccgcctccccaggcggttttttcgtttacagagcaggagattacgacgatcgtaaaaggatctcaagaagatcctttacggattcccgacaccatcactctagatttcagtgcaatttatctcttcaaatgtagcacctgaagtcagccccatacgatataagttgtaattctcatgttagtcatgccccgcgcccaccggaaggagctgactgggttgaaggctctcaagggcatcggtcgagatcccggtgcctaatgagtgagctaactttgaccttccctacacacaagcgcccttgttgcaacggctccgcaccggtaaaccagcaatagacataagcggctatttaacgaccctgccctgaaccgacgacaagctgacgaccgggtctccgcaagtggcacttttcggggaaatgtgcgcggaacccctatttgtttatttttctaaatacattcaaatatgtatccgctcatgaattaattcttagaaaaactcatcgagcatcaaatgaaactgcaatttattcatatcaggattatcaataccatatttttgaaaaagccgtttctgtaatgaaggagaaaactcaccgaggcagttccataggatggcaagatcctggtatcggtctgcgattccgactcgtccaacatcaatacaacctattaatttcccctcgtcaaaaataaggttatcaagtgagaaatcaccatgagtgacgactgaatccggtgagaatggcaaaagtttatgcatttctttccagacttgttcaacaggccagccattacgctcgtcatcaaaatcactcgcatcaaccaaaccgttattcattcgtgattgcgcctgagcgagacgaaatacgcggtcgctgttaaaaggacaattacaaacaggaatcgaatgcaaccggcgcaggaacactgccagcgcatcaacaatattttcacctgaatcaggatattcttctaatacctggaatgctgttttcccggggatcgcagtggtgagtaaccatgcatcatcaggagtacggataaaatgcttgatggtcggaagaggcataaattccgtcagccagtttagtctgaccatctcatctgtaacatcattggcaacgctacctttgccatgtttcagaaacaactctggcgcatcgggcttcccatacaatcgatagattgtcgcacctgattgcccgacattatcgcgagcccatttatacccatataaatcagcatccatgttggaatttaatcgcggcctagagcaagacgtttcccgttgaatatggctcatactcttcctttttcaatattattgaagcatttatcagggttattgtctcatgagcggatacatatttgaatgtatttagaaaaataaacaaa

SEQ ID NO: 154 - DNA, 1956 bp, synthetic construct
  source 1..1956: mol_type = other DNA
taggcatgctagcgcagaaacgtcctagaagatgccaggaggatacttagcagagagacaataaggccggagcgaagccgtttttccataggctccgcccccctgacgaacatcacgaaatctgacgctcaaatcagtggtggcgaaacccgacaggactataaagataccaggcgtttccccctgatggctccctcttgcgctctcctgttcccgtcctgcggcgtccgtgttgtggtggaggctttacccaaatcaccacgtcccgttccgtgtagacagttcgctccaagctgggctgtgtgcaagaaccccccgttcagcccgactgctgcgccttatccggtaactatcatcttgagtccaacccggaaagacacgacaaaacgccactggcagcagccattggtaactgagaattagtggatttagatatcgagagtcttgaagtggtggcctaacagaggctacactgaaaggacagtatttggtatctgcgctccactaaagccagttaccaggttaagcagttccccaactgacttaaccttcgatcaaaccgcctccccaggcggttttttcgtttacagagcaggagattacgacgatcgtaaaaggatctcaagaagatcctttacggattcccgacaccatcactctagatttcagtgcaatttatctcttcaaatgtagcacctgaagtcagccccatacgatataagttgtaattctcatgttagtcatgccccgcgcccaccggaaggagctgactgggttgaaggctctcaagggcatcggtcgagatcccggtgcctaatgagtgagctaactttgatcttccctacacacaagcgcccttgttgcaacggctccgcaccggtaaaccagcaatagacataagcggctatttaacgaccctgccctgaaccgacgacaagctgacgaccgggtctccgcaagtggcacttttcggggaaatgtgcgcggaacccctatttgtttatttttctaaatacattcaaatatgtatccgctcatgaattaattcttagaaaaactcatcgagcatcaaatgaaactgcaatttattcatatcaggattatcaataccatatttttgaaaaagccgtttctgtaatgaaggagaaaactcaccgaggcagttccataggatggcaagatcctggtatcggtctgcgattccgactcgtccaacatcaatacaacctattaatttcccctcgtcaaaaataaggttatcaagtgagaaatcaccatgagtgacgactgaatccggtgagaatggcaaaagtttatgcatttctttccagacttgttcaacaggccagccattacgctcgtcatcaaaatcactcgcatcaaccaaaccgttattcattcgtgattgcgcctgagcgagacgaaatacgcggtcgctgttaaaaggacaattacaaacaggaatcgaatgcaaccggcgcaggaacactgccagcgcatcaacaatattttcacctgaatcaggatattcttctaatacctggaatgctgttttcccggggatcgcagtggtgagtaaccatgcatcatcaggagtacggataaaatgcttgatggtcggaagaggcataaattccgtcagccagtttagtctgaccatctcatctgtaacatcattggcaacgctacctttgccatgtttcagaaacaactctggcgcatcgggcttcccatacaatcgatagattgtcgcacctgattgcccgacattatcgcgagcccatttatacccatataaatcagcatccatgttggaatttaatcgcggcctagagcaagacgtttcccgttgaatatggctcatactcttcctttttcaatattattgaagcatttatcagggttattgtctcatgagcggatacatatttgaatgtatttagaaaaataaacaaa

SEQ ID NO: 155 - DNA, 1956 bp, synthetic construct
  source 1..1956: mol_type = other DNA
taggcatgctagcgcagaaacgtcctagaagatgccaggaggatacttagcagagagacaataaggccggagcgaagccgtttttccataggctccgcccccctgacgaacatcacgaaatctgacgctcaaatcagtggtggcgaaacccgacaggactataaagataccaggcgtttccccctgatggctccctcttgcgctctcctgttcccgtcctgcggcgtccgtgttgtggtggaggctttacccaaatcaccacgtcccgttccgtgtagacagttcgctccaagctgggctgtgtgcaagaaccccccgttcagcccgactgctgcgccttatccggtaactatcatcttgagtccaacccggaaagacacgacaaaacgccactggcagcagccattggtaactgagaattagtggatttagatatcgagagtcttgaagtggtggcctaacagaggctacactgaaaggacagtatttggtatctgcgctccactaaagccagttaccaggttaagcagttccccaactgacttaaccttcgatcaaaccgcctccccaggcggttttttcgtttacagagcaggagattacgacgatcgtaaaaggatctcaagaagatcctttacggattcccgacaccatcactctagatttcagtgcaatttatctcttcaaatgtagcacctgaagtcagccccatacgatataagttgtaattctcatgttagtcatgccccgcgcccaccggaaggagctgactgggttgaaggctctcaagggcatcggtcgagatcccggtgcctaatgagtgagctaactttcaccttccctacacacaagcgcccttgttgcaacggctccgcaccggtaaaccagcaatagacataagcggctatttaacgaccctgccctgaaccgacgacaagctgacgaccgggtctccgcaagtggcacttttcggggaaatgtgcgcggaacccctatttgtttatttttctaaatacattcaaatatgtatccgctcatgaattaattcttagaaaaactcatcgagcatcaaatgaaactgcaatttattcatatcaggattatcaataccatatttttgaaaaagccgtttctgtaatgaaggagaaaactcaccgaggcagttccataggatggcaagatcctggtatcggtctgcgattccgactcgtccaacatcaatacaacctattaatttcccctcgtcaaaaataaggttatcaagtgagaaatcaccatgagtgacgactgaatccggtgagaatggcaaaagtttatgcatttctttccagacttgttcaacaggccagccattacgctcgtcatcaaaatcactcgcatcaaccaaaccgttattcattcgtgattgcgcctgagcgagacgaaatacgcggtcgctgttaaaaggacaattacaaacaggaatcgaatgcaaccggcgcaggaacactgccagcgcatcaacaatattttcacctgaatcaggatattcttctaatacctggaatgctgttttcccggggatcgcagtggtgagtaaccatgcatcatcaggagtacggataaaatgcttgatggtcggaagaggcataaattccgtcagccagtttagtctgaccatctcatctgtaacatcattggcaacgctacctttgccatgtttcagaaacaactctggcgcatcgggcttcccatacaatcgatagattgtcgcacctgattgcccgacattatcgcgagcccatttatacccatataaatcagcatccatgttggaatttaatcgcggcctagagcaagacgtttcccgttgaatatggctcatactcttcctttttcaatattattgaagcatttatcagggttattgtctcatgagcggatacatatttgaatgtatttagaaaaataaacaaa

SEQ ID NO: 156 - DNA, 5004 bp, synthetic construct
  source 1..5004: mol_type = other DNA
caccgtaaccagcaaatcaatatcactgtgtggcttcaggccgccatccactgcggagccgtacaaatgtacggccagcaacgtcggttcgagatggcgctcgatgacgccaactacctctgatagttgagtcgatacttcggcgatcaccgcttccctcatactcttcctttttcaatattattgaagcatttatcagggttattgtctcatgagcggatacatatttgaatgtatttagaaaaataaacaaatagctagctcactcggtcgctacgctccgggcgtgagactgcggcgggcgctgcggacacatacaaagttacccacagattccgtggataagcaggggactaacatgtgaggcaaaacagcagggccgcgccggtggcgtttttccataggctccgccctcctgccagagttcacataaacagacgcttttccggtgcatctgtgggagccgtgaggctcaaccatgaatctgacagtacgggcgaaacccgacaggacttaaagatccccaccgtttccggcgggtcgctccctcttgcgctctcctgttccgaccctgccgtttaccggatacctgttccgcctttctcccttacgggaagtgtggcgctttctcatagctcacacactggtatctcggctcggtgtaggtcgttcgctccaagctgggctgtaagcaagaactccccgttcagcccgactgctgcgccttatccggtaactgttcacttgagtccaacccggaaaagcacggtaaaacgccactggcagcagccattggtaactgggagttcgcagaggatttgtttagctaaacacgcggttgctcttgaagtgtgcgccaaagtccggctacactggaaggacagatttggttgctgtgctctgcgaaagccagttaccacggttaagcagttccccaactgacttaaccttcgatcaaaccacctccccaggtggttttttcgtttacagggcaaaagattacgcgcagaaaaaaaggatctcaagaagatcctttgatcttttctactgaaccgctctagatttcagtgcaatttatctcttcaaatgtagcacctgaagtcagccccatacgatataagttgtaattctcatgttagtcatgccccgcgcccaccggaaggagctgactgggttgaaggctctcaagggcatcggtcgagatcccggtgcctaatgagtgagctaacttacattaattgcgttgcgctcactgcccgctttccagtcgggaaacctgtcgtgccagctgcattaatgaatcggccaacgcgcggggagaggcggtttgcgtattgggcgccagggtggtttttcttttcaccagtgagacgggcaacagctgattgcccttcaccgcctggccctgagagagttgcagcaagcggtccacgctggtttgccccagcaggcgaaaatcctgtttgatggtggttaacggcgggatataacatgagctgtcttcggtatcgtcgtatcccactaccgagatgtccgcaccaacgcgcagcccggactcggtaatggcgcgcattgcgcccagcgccatctgatcgttggcaaccagcatcgcagtgggaacgatgccctcattcagcatttgcatggtttgttgaaaaccggacatggcactccagtcgccttcccgttccgctatcggctgaatttgattgcgagtgagatatttatgccagccagccagacgcagacgcgccgagacagaacttaatgggcccgctaacagcgcgatttgctggtgacccaatgcgaccagatgctccacgcccagtcgcgtaccgtcttcatgggagaaaataatactgttgatgggtgtctggtcagagacatcaagaaataacgccggaacattagtgcaggcagcttccacagcaatggcatcctggtcatccagcggatagttaatgatcagcccactgacgcgttgcgcgagaagattgtgcaccgccgctttacaggcttcgacgccgcttcgttctaccatcgacaccaccacgctggcacccagttgatcggcgcgagatttaatcgccgcgacaatttgcgacggcgcgtgcagggccagactggaggtggcaacgccaatcagcaacgactgtttgcccgccagttgttgtgccacgcggttgggaatgtaattcagctccgccatcgccgcttccactttttcccgcgttttcgcagaaacgtggctggcctggttcaccacgcgggaaacggtctgataagagacaccggcatactctgcgacatcgtataacgttactggtttcacattcaccaccctgaattgactctcttccgggcgctatcatgccataccgcgaaaggttttgcgccattcgatggtgtccgggattgacagctagctcagtcctaggtataatgctagcgtggagatatacctcgagttaagcgcggcttgtatcgaacaaagtctggcaaactaattaatgctgatgtcaatggcgcattaaacatcttaaagaaaagtaaagctgtagacctgagtgtcttatgctctagcggcgaagtggacacgcctcaaagaataaggattgcttgaagcagtcaaacttctttggaagcccccacttcaaattttcgctagaaaattaagtgggggtagttcacccgggcaaaccatcgaagtgaccagcgaatacctgttccgctcgcggccgcaataactagcataaccccttggggcctctaaacgggtcttgaggggttttttgctgaagtcgacttttacggctagctcagtcctaggtactatgctagcgtggagatatacggtaccaaggagatataccatgggctatttttgcatcaagcagcagcttaatgggttgacgaaggaagagtacctgacactgcgtgagttgtgccatattgccaaaaacatgtacaacgttggcctttacaacgtacgtcagtactattttgagcataaggagttcttaaattacgaaaagaactatcacttggcgaagactaatgaaaactacaagttactgaactcgaacatggctcaacaaatcttgaaaaaagtaaatgaagccttcaaaagtttcttcggtcttatttcgcttgccaaacaaggtaaatacgaccataaagcaatctcgattcccaaatacttaaagaaagacggtttccattcgttaatcatcggccaaatccgcattgacggaaataagttcacgattccatactctcgcttattcaaaaagacacataagcccattacaatcactattccaccagtgttacttgataaaaagattaagcagatcgaaatcattccgaaacaccatgcacgtttcttcgagatccagtacaagtacgaaatgcctgaagatcagcgcgaacttaatgatcagaaggcgcttgcgattgacttggggcttaataacttggctacatgtgtaacctcagacggacgttctttcattattgacggccgtcgtcttaaatctatcaaccaatggttcaataaggaaaacgctcgcttgcagtctattaaagataaacagaagattaagggaaccacgcgtaaacaagcactgcttgcgatgaatcgtaataacaaggtgaacgactatatcaataagacctgccgctatatcattaactactgtatcgaaaatcaaattggcaagctggtaatcgggtacgccgaaacatggcagcgcaacatgaatttgggcaagaaaaccaaccaaaacttcgtcaatatccctcttggaaacattaaggagaagttagaatacctttgtgagttctatgggatcgagtttttgaagcaagaagagtcgtatacaagtcaagcgtcgttttttgatggagatgaaatccccgaatacaacgcggataatcccaaagagtacaaattttctggtaagcgcattaagcgcggcctgtatcgcactaaatcaggaaaacttattaacgcagacgtgaatggggcattgaatattttaaaaaaaagcaaggctgttgatttgtctgtcttgtgcagttctggtgaggtagacaccccgcaacgtattcgcatcgcgtgataacctaggctgctgccaccgctgagcaataactagcataaccccttggggcctctaaacgggtcttgaggggttttttgctgaaacctcaggcatttgagaagcacacggtcacactgcttccggtagtcaataaaccggtaaaccagcaatagacataagcggctatttaacgaccctgccctgaaccgacgaccgggtcatcgtggccggatcttgcggcccctcggcttgaacgaattgttagacattatttgccgactaccttggtgatctcgcctttcacgtagtggacaaattcttccaactgatctgcgcgcgaggccaagcgatcttcttcttgtccaagataagcctgtctagcttcaagtatgacgggctgatactgggccggcaggcgctccattgcccagtcggcagcgacatccttcggcgcgattttgccggttactgcgctgtaccaaatgcgggacaacgtaagcactacatttcgctcatcgccagcccagtcgggcggcgagttccatagcgttaaggtttcatttagcgcctcaaatagatcctgttcaggaaccggatcaaagagttcctccgccgctggacctaccaaggcaacgctatgttctcttgcttttgtcagcaagatagccagatcaatgtcgatcgtggctggctcgaagatacctgcaagaatgtcattgcgctgccattctccaaattgcagttcgcgcttagctggataacgccacggaatgatgtcgtcgtgcacaacaatggtgacttctacagcgcggagaatctcgctctctccaggggaagccgaagtttccaaaaggtcgttgatcaaagctcgccgcgttgtttcatcaagccttacggt

SEQ ID NO: 157 - DNA, 5004 bp, synthetic construct
  source 1..5004: mol_type = other DNA
caccgtaaccagcaaatcaatatcactgtgtggcttcaggccgccatccactgcggagccgtacaaatgtacggccagcaacgtcggttcgagatggcgctcgatgacgccaactacctctgatagttgagtcgatacttcggcgatcaccgcttccctcatactcttcctttttcaatattattgaagcatttatcagggttattgtctcatgagcggatacatatttgaatgtatttagaaaaataaacaaatagctagctcactcggtcgctacgctccgggcgtgagactgcggcgggcgctgcggacacatacaaagttacccacagattccgtggataagcaggggactaacatgtgaggcaaaacagcagggccgcgccggtggcgtttttccataggctccgccctcctgccagagttcacataaacagacgcttttccggtgcatctgtgggagccgtgaggctcaaccatgaatctgacagtacgggcgaaacccgacaggacttaaagatccccaccgtttccggcgggtcgctccctcttgcgctctcctgttccgaccctgccgtttaccggatacctgttccgcctttctcccttacgggaagtgtggcgctttctcatagctcacacactggtatctcggctcggtgtaggtcgttcgctccaagctgggctgtaagcaagaactccccgttcagcccgactgctgcgccttatccggtaactgttcacttgagtccaacccggaaaagcacggtaaaacgccactggcagcagccattggtaactgggagttcgcagaggatttgtttagctaaacacgcggttgctcttgaagtgtgcgccaaagtccggctacactggaaggacagatttggttgctgtgctctgcgaaagccagttaccacggttaagcagttccccaactgacttaaccttcgatcaaaccacctccccaggtggttttttcgtttacagggcaaaagattacgcgcagaaaaaaaggatctcaagaagatcctttgatcttttctactgaaccgctctagatttcagtgcaatttatctcttcaaatgtagcacctgaagtcagccccatacgatataagttgtaattctcatgttagtcatgccccgcgcccaccggaaggagctgactgggttgaaggctctcaagggcatcggtcgagatcccggtgcctaatgagtgagctaacttacattaattgcgttgcgctcactgcccgctttccagtcgggaaacctgtcgtgccagctgcattaatgaatcggccaacgcgcggggagaggcggtttgcgtattgggcgccagggtggtttttcttttcaccagtgagacgggcaacagctgattgcccttcaccgcctggccctgagagagttgcagcaagcggtccacgctggtttgccccagcaggcgaaaatcctgtttgatggtggttaacggcgggatataacatgagctgtcttcggtatcgtcgtatcccactaccgagatgtccgcaccaacgcgcagcccggactcggtaatggcgcgcattgcgcccagcgccatctgatcgttggcaaccagcatcgcagtgggaacgatgccctcattcagcatttgcatggtttgttgaaaaccggacatggcactccagtcgccttcccgttccgctatcggctgaatttgattgcgagtgagatatttatgccagccagccagacgcagacgcgccgagacagaacttaatgggcccgctaacagcgcgatttgctggtgacccaatgcgaccagatgctccacgcccagtcgcgtaccgtcttcatgggagaaaataatactgttgatgggtgtctggtcagagacatcaagaaataacgccggaacattagtgcaggcagcttccacagcaatggcatcctggtcatccagcggatagttaatgatcagcccactgacgcgttgcgcgagaagattgtgcaccgccgctttacaggcttcgacgccgcttcgttctaccatcgacaccaccacgctggcacccagttgatcggcgcgagatttaatcgccgcgacaatttgcgacggcgcgtgcagggccagactggaggtggcaacgccaatcagcaacgactgtttgcccgccagttgttgtgccacgcggttgggaatgtaattcagctccgccatcgccgcttccactttttcccgcgttttcgcagaaacgtggctggcctggttcaccacgcgggaaacggtctgataagagacaccggcatactctgcgacatcgtataacgttactggtttcacattcaccaccctgaattgactctcttccgggcgctatcatgccataccgcgaaaggttttgcgccattcgatggtgtccgggattgacagctagctcagtcctaggtataatgctagcgtggagatatacctcgagttaagcgcggcttgtatcgaacaaagtctggcaaactaattaatgctgatgtcaatggcgcattaaacatcttaaagaaaagtaaagctgtagacctgagtgtcttatgctctagcggcgaagtggacacgcctcaaagaataaggattgcttgaagcagtcaaacttctttggaagcccccacttcaaattttcgctagaaaattaagtgggggtagttcacccgggcaaaccatcgaagtgaccagcgaatacctgttccgctcgcggccgcaataactagcataaccccttggggcctctaaacgggtcttgaggggttttttgctgaagtcgacttttacggctagctcagtcctaggtactatgctagcgtggagatatacggtaccaaggagatataccatgggctatttttgcatcaagcagcagcttaatgggttgacgaaggaagagtacctgacactgcgtgagttgtgccatattgccaaaaacatgtacaacgttggcctttacaacgtacgtcagtactattttgagcataaggagttcttaaattacgaaaagaactatcacttggcgaagactaatgaaaactacaagttactgaactcgaacatggctcaacaaatcttgaaaaaagtaaatgaagccttcaaaagtttcttcggtcttatttcgcttgccaaacaaggtaaatacgaccataaagcaatctcgattcccaaatacttaaagaaagacggtttccattcgttaatcatcggccaaatccgcattgacggaaataagttcacgattccatactctcgcttattcaaaaagacacataagcccattacaatcactattccaccagtgttacttgataaaaagattaagcagatcgaaatcattccgaaacaccatgcacgtttcttcgagatccagtacaagtacgaaatgcctgaagatcagcgcgaacttaatgatcagaaggcgcttgcgattgccttggggcttaataacttggctacatgtgtaacctcagacggacgttctttcattattgacggccgtcgtcttaaatctatcaaccaatggttcaataaggaaaacgctcgcttgcagtctattaaagataaacagaagattaagggaaccacgcgtaaacaagcactgcttgcgatgaatcgtaataacaaggtgaacgactatatcaataagacctgccgctatatcattaactactgtatcgaaaatcaaattggcaagctggtaatcgggtacgccgaaacatggcagcgcaacatgaatttgggcaagaaaaccaaccaaaacttcgtcaatatccctcttggaaacattaaggagaagttagaatacctttgtgagttctatgggatcgagtttttgaagcaagaagagtcgtatacaagtcaagcgtcgttttttgatggagatgaaatccccgaatacaacgcggataatcccaaagagtacaaattttctggtaagcgcattaagcgcggcctgtatcgcactaaatcaggaaaacttattaacgcagacgtgaatggggcattgaatattttaaaaaaaagcaaggctgttgatttgtctgtcttgtgcagttctggtgaggtagacaccccgcaacgtattcgcatcgcgtgataacctaggctgctgccaccgctgagcaataactagcataaccccttggggcctctaaacgggtcttgaggggttttttgctgaaacctcaggcatttgagaagcacacggtcacactgcttccggtagtcaataaaccggtaaaccagcaatagacataagcggctatttaacgaccctgccctgaaccgacgaccgggtcatcgtggccggatcttgcggcccctcggcttgaacgaattgttagacattatttgccgactaccttggtgatctcgcctttcacgtagtggacaaattcttccaactgatctgcgcgcgaggccaagcgatcttcttcttgtccaagataagcctgtctagcttcaagtatgacgggctgatactgggccggcaggcgctccattgcccagtcggcagcgacatccttcggcgcgattttgccggttactgcgctgtaccaaatgcgggacaacgtaagcactacatttcgctcatcgccagcccagtcgggcggcgagttccatagcgttaaggtttcatttagcgcctcaaatagatcctgttcaggaaccggatcaaagagttcctccgccgctggacctaccaaggcaacgctatgttctcttgcttttgtcagcaagatagccagatcaatgtcgatcgtggctggctcgaagatacctgcaagaatgtcattgcgctgccattctccaaattgcagttcgcgcttagctggataacgccacggaatgatgtcgtcgtgcacaacaatggtgacttctacagcgcggagaatctcgctctctccaggggaagccgaagtttccaaaaggtcgttgatcaaagctcgccgcgttgtttcatcaagccttacggt

SEQ ID NO: 158 - DNA, 5056 bp, synthetic construct
  source 1..5056: mol_type = other DNA
ttgaatgtatttagaaaaataaacaaatagctagctcactcggtcgctacgctccgggcgtgagactgcggcgggcgctgcggacacatacaaagttacccacagattccgtggataagcaggggactaacatgtgaggcaaaacagcagggccgcgccggtggcgtttttccataggctccgccctcctgccagagttcacataaacagacgcttttccggtgcatctgtgggagccgtgaggctcaaccatgaatctgacagtacgggcgaaacccgacaggacttaaagatccccaccgtttccggcgggtcgctccctcttgcgctctcctgttccgaccctgccgtttaccggatacctgttccgcctttctcccttacgggaagtgtggcgctttctcatagctcacacactggtatctcggctcggtgtaggtcgttcgctccaagctgggctgtaagcaagaactccccgttcagcccgactgctgcgccttatccggtaactgttcacttgagtccaacccggaaaagcacggtaaaacgccactggcagcagccattggtaactgggagttcgcagaggatttgtttagctaaacacgcggttgctcttgaagtgtgcgccaaagtccggctacactggaaggacagatttggttgctgtgctctgcgaaagccagttaccacggttaagcagttccccaactgacttaaccttcgatcaaaccacctccccaggtggttttttcgtttacagggcaaaagattacgcgcagaaaaaaaggatctcaagaagatcctttgatcttttctactgaaccgctctagatttcagtgcaatttatctcttcaaatgtagcacctgaagtcagccccatacgatataagttgtaattctcatgttagtcatgccccgcgcccaccggaaggagctgactgggttgaaggctctcaagggcatcggtcgagatcccggtgcctaatgagtgagctaacttacattaattgcgttgcgctcactgcccgctttccagtcgggaaacctgtcgtgccagctgcattaatgaatcggccaacgcgcggggagaggcggtttgcgtattgggcgccagggtggtttttcttttcaccagtgagacgggcaacagctgattgcccttcaccgcctggccctgagagagttgcagcaagcggtccacgctggtttgccccagcaggcgaaaatcctgtttgatggtggttaacggcgggatataacatgagctgtcttcggtatcgtcgtatcccactaccgagatgtccgcaccaacgcgcagcccggactcggtaatggcgcgcattgcgcccagcgccatctgatcgttggcaaccagcatcgcagtgggaacgatgccctcattcagcatttgcatggtttgttgaaaaccggacatggcactccagtcgccttcccgttccgctatcggctgaatttgattgcgagtgagatatttatgccagccagccagacgcagacgcgccgagacagaacttaatgggcccgctaacagcgcgatttgctggtgacccaatgcgaccagatgctccacgcccagtcgcgtaccgtcttcatgggagaaaataatactgttgatgggtgtctggtcagagacatcaagaaataacgccggaacattagtgcaggcagcttccacagcaatggcatcctggtcatccagcggatagttaatgatcagcccactgacgcgttgcgcgagaagattgtgcaccgccgctttacaggcttcgacgccgcttcgttctaccatcgacaccaccacgctggcacccagttgatcggcgcgagatttaatcgccgcgacaatttgcgacggcgcgtgcagggccagactggaggtggcaacgccaatcagcaacgactgtttgcccgccagttgttgtgccacgcggttgggaatgtaattcagctccgccatcgccgcttccactttttcccgcgttttcgcagaaacgtggctggcctggttcaccacgcgggaaacggtctgataagagacaccggcatactctgcgacatcgtataacgttactggtttcacattcaccaccctgaattgactctcttccgggcgctatcatgccataccgcgaaaggttttgcgccattcgatggtgtccgggagaaatttgacagctagctcagtcctaggtataatgctagccctcgagtgtcctggccgtaaccgacccagcgcccgttgcaccacaggtcaactccccaccacttaaagcctaacggcttttgaagtgggggcttggcaagccctagttgactaccctcagccattcaatggctacgttggaagggtcatgacacttacggatgctcctccagtccgtaaccctgtcgcagatggttaaaagctctgatgggtaggagcggtgctgtctgccgaacaagcccttccaacattggggaggaggaactcactcctgaaaggaggtacacgtcttgttcgtgtacattatcaataagcatggaaaaccactcgcggccgcaataactagcataaccccttggggcctctaaacgggtcttgaggggttttttgctgaagtcgacttttacggctagctcagtcctaggtactatgctagccaggtaccaaggagatataccatggggtttgtatacattatcaataagcatggaaaaccgttaatgccgtgtagcccccgcaaagcacgtctgcttctgaaacaaaagaaagcaaaagtagttcgtcgtacaccgtttacgattcaattgctgtatggcagctccggctacaagcagccggtatcacttggcgtggatatgggcacccgccatgtcggcatttctgctactaccaagaaggatgtattgttcgaggcagaggcgcagttgcgtacggatattgtggaattgttagctatccgccgccagttccgccgctcgcgccgcaaccgcaagacccgttaccgtgaggctcgtttcttgaaccgtcgtaaacccgaagggtggttgccgccttcaatccaacataagattaattcgcatattaagctgattgatttagttcataacattttgcccgtgacgtctgttactattgaagtagccgcgttcgacacccagaaattaaaaaacttgaacattcgcggcgtcgagtaccaacagggggaacaaatgggtttttggaacgtacgcgaatacgtgttatatcgcgacaaccacacctgccagtattgtaagggtaagaaaaaagatccagtattgcaagtacaccatattgaatctcgcaagacgggtggcgactcgcccgataatttgattactttgtgcaagacgtgccatcatgagattcatgagaaaggcctggaacatatttttcaacgcaaacgcccgccaatgcgtgacgcgtctcagatgacggccatgcgttgggcgatgttttcccgcatccgtgagaagtacagccacgcgaacatcacatatggttatatcaccaaatgtattcgcatcgcgaacgggttaagcaagtcgcacatggtagacgcacgttgcatttcaggcaatcctttagcgaaaccgagtggtaccgtatatttgctgaagttcgttcgcaagaataatcgccaattacataaggcgacaattttgaaaggcggtaagcgtaaatccaacaaggctccccgcttcgtaaaggggttccagctgttcgataaagtcgtgtatgagcgtaaagagtgttttattttcgggcgtcgttcttccggctacttcgatttacgtctgcttgacgggactaaagtccacgcttcggccagctggaaaaaattaaaacgtgttgaacacgcaagtacattactgattgaacgccgtaagggggatagttcgccaaccttcgcattagcgtgataacctaggctgctgccaccgctgagcaataactagcataaccccttggggcctctaaacgggtcttgaggggttttttgctgaaacctcaggcatttgagaagcacacggtcacactgcttccggtagtcaataaaccggtaaaccagcaatagacataagcggctatttaacgaccctgccctgaaccgacgaccgggtcatcgtggccggatcttgcggcccctcggcttgaacgaattgttagacattatttgccgactaccttggtgatctcgcctttcacgtagtggacaaattcttccaactgatctgcgcgcgaggccaagcgatcttcttcttgtccaagataagcctgtctagcttcaagtatgacgggctgatactgggccggcaggcgctccattgcccagtcggcagcgacatccttcggcgcgattttgccggttactgcgctgtaccaaatgcgggacaacgtaagcactacatttcgctcatcgccagcccagtcgggcggcgagttccatagcgttaaggtttcatttagcgcctcaaatagatcctgttcaggaaccggatcaaagagttcctccgccgctggacctaccaaggcaacgctatgttctcttgcttttgtcagcaagatagccagatcaatgtcgatcgtggctggctcgaagatacctgcaagaatgtcattgcgctgccattctccaaattgcagttcgcgcttagctggataacgccacggaatgatgtcgtcgtgcacaacaatggtgacttctacagcgcggagaatctcgctctctccaggggaagccgaagtttccaaaaggtcgttgatcaaagctcgccgcgttgtttcatcaagccttacggtcaccgtaaccagcaaatcaatatcactgtgtggcttcaggccgccatccactgcggagccgtacaaatgtacggccagcaacgtcggttcgagatggcgctcgatgacgccaactacctctgatagttgagtcgatacttcggcgatcaccgcttccctcatactcttcctttttcaatattattgaagcatttatcagggttattgtctcatgagcggatacatat

SEQ ID NO: 159 - DNA, 5056 bp, synthetic construct
  source 1..5056: mol_type = other DNA
ttgaatgtatttagaaaaataaacaaatagctagctcactcggtcgctacgctccgggcgtgagactgcggcgggcgctgcggacacatacaaagttacccacagattccgtggataagcaggggactaacatgtgaggcaaaacagcagggccgcgccggtggcgtttttccataggctccgccctcctgccagagttcacataaacagacgcttttccggtgcatctgtgggagccgtgaggctcaaccatgaatctgacagtacgggcgaaacccgacaggacttaaagatccccaccgtttccggcgggtcgctccctcttgcgctctcctgttccgaccctgccgtttaccggatacctgttccgcctttctcccttacgggaagtgtggcgctttctcatagctcacacactggtatctcggctcggtgtaggtcgttcgctccaagctgggctgtaagcaagaactccccgttcagcccgactgctgcgccttatccggtaactgttcacttgagtccaacccggaaaagcacggtaaaacgccactggcagcagccattggtaactgggagttcgcagaggatttgtttagctaaacacgcggttgctcttgaagtgtgcgccaaagtccggctacactggaaggacagatttggttgctgtgctctgcgaaagccagttaccacggttaagcagttccccaactgacttaaccttcgatcaaaccacctccccaggtggttttttcgtttacagggcaaaagattacgcgcagaaaaaaaggatctcaagaagatcctttgatcttttctactgaaccgctctagatttcagtgcaatttatctcttcaaatgtagcacctgaagtcagccccatacgatataagttgtaattctcatgttagtcatgccccgcgcccaccggaaggagctgactgggttgaaggctctcaagggcatcggtcgagatcccggtgcctaatgagtgagctaacttacattaattgcgttgcgctcactgcccgctttccagtcgggaaacctgtcgtgccagctgcattaatgaatcggccaacgcgcggggagaggcggtttgcgtattgggcgccagggtggtttttcttttcaccagtgagacgggcaacagctgattgcccttcaccgcctggccctgagagagttgcagcaagcggtccacgctggtttgccccagcaggcgaaaatcctgtttgatggtggttaacggcgggatataacatgagctgtcttcggtatcgtcgtatcccactaccgagatgtccgcaccaacgcgcagcccggactcggtaatggcgcgcattgcgcccagcgccatctgatcgttggcaaccagcatcgcagtgggaacgatgccctcattcagcatttgcatggtttgttgaaaaccggacatggcactccagtcgccttcccgttccgctatcggctgaatttgattgcgagtgagatatttatgccagccagccagacgcagacgcgccgagacagaacttaatgggcccgctaacagcgcgatttgctggtgacccaatgcgaccagatgctccacgcccagtcgcgtaccgtcttcatgggagaaaataatactgttgatgggtgtctggtcagagacatcaagaaataacgccggaacattagtgcaggcagcttccacagcaatggcatcctggtcatccagcggatagttaatgatcagcccactgacgcgttgcgcgagaagattgtgcaccgccgctttacaggcttcgacgccgcttcgttctaccatcgacaccaccacgctggcacccagttgatcggcgcgagatttaatcgccgcgacaatttgcgacggcgcgtgcagggccagactggaggtggcaacgccaatcagcaacgactgtttgcccgccagttgttgtgccacgcggttgggaatgtaattcagctccgccatcgccgcttccactttttcccgcgttttcgcagaaacgtggctggcctggttcaccacgcgggaaacggtctgataagagacaccggcatactctgcgacatcgtataacgttactggtttcacattcaccaccctgaattgactctcttccgggcgctatcatgccataccgcgaaaggttttgcgccattcgatggtgtccgggagaaatttgacagctagctcagtcctaggtataatgctagccctcgagtgtcctggccgtaaccgacccagcgcccgttgcaccacaggtcaactccccaccacttaaagcctaacggcttttgaagtgggggcttggcaagccctagttgactaccctcagccattcaatggctacgttggaagggtcatgacacttacggatgctcctccagtccgtaaccctgtcgcagatggttaaaagctctgatgggtaggagcggtgctgtctgccgaacaagcccttccaacattggggaggaggaactcactcctgaaaggaggtacacgtcttgttcgtgtacattatcaataagcatggaaaaccactcgcggccgcaataactagcataaccccttggggcctctaaacgggtcttgaggggttttttgctgaagtcgacttttacggctagctcagtcctaggtactatgctagccaggtaccaaggagatataccatggggtttgtatacattatcaataagcatggaaaaccgttaatgccgtgtagcccccgcaaagcacgtctgcttctgaaacaaaagaaagcaaaagtagttcgtcgtacaccgtttacgattcaattgctgtatggcagctccggctacaagcagccggtatcacttggcgtggccatgggcacccgccatgtcggcatttctgctactaccaagaaggatgtattgttcgaggcagaggcgcagttgcgtacggatattgtggaattgttagctatccgccgccagttccgccgctcgcgccgcaaccgcaagacccgttaccgtgaggctcgtttcttgaaccgtcgtaaacccgaagggtggttgccgccttcaatccaacataagattaattcgcatattaagctgattgatttagttcataacattttgcccgtgacgtctgttactattgaagtagccgcgttcgacacccagaaattaaaaaacttgaacattcgcggcgtcgagtaccaacagggggaacaaatgggtttttggaacgtacgcgaatacgtgttatatcgcgacaaccacacctgccagtattgtaagggtaagaaaaaagatccagtattgcaagtagccgccattgaatctcgcaagacgggtggcgactcgcccgataatttgattactttgtgcaagacgtgccatcatgagattcatgagaaaggcctggaacatatttttcaacgcaaacgcccgccaatgcgtgacgcgtctcagatgacggccatgcgttgggcgatgttttcccgcatccgtgagaagtacagccacgcgaacatcacatatggttatatcaccaaatgtattcgcatcgcgaacgggttaagcaagtcgcacatggtagacgcacgttgcatttcaggcaatcctttagcgaaaccgagtggtaccgtatatttgctgaagttcgttcgcaagaataatcgccaattacataaggcgacaattttgaaaggcggtaagcgtaaatccaacaaggctccccgcttcgtaaaggggttccagctgttcgataaagtcgtgtatgagcgtaaagagtgttttattttcgggcgtcgttcttccggctacttcgatttacgtctgcttgacgggactaaagtccacgcttcggccagctggaaaaaattaaaacgtgttgaacacgcaagtacattactgattgaacgccgtaagggggatagttcgccaaccttcgcattagcgtgataacctaggctgctgccaccgctgagcaataactagcataaccccttggggcctctaaacgggtcttgaggggttttttgctgaaacctcaggcatttgagaagcacacggtcacactgcttccggtagtcaataaaccggtaaaccagcaatagacataagcggctatttaacgaccctgccctgaaccgacgaccgggtcatcgtggccggatcttgcggcccctcggcttgaacgaattgttagacattatttgccgactaccttggtgatctcgcctttcacgtagtggacaaattcttccaactgatctgcgcgcgaggccaagcgatcttcttcttgtccaagataagcctgtctagcttcaagtatgacgggctgatactgggccggcaggcgctccattgcccagtcggcagcgacatccttcggcgcgattttgccggttactgcgctgtaccaaatgcgggacaacgtaagcactacatttcgctcatcgccagcccagtcgggcggcgagttccatagcgttaaggtttcatttagcgcctcaaatagatcctgttcaggaaccggatcaaagagttcctccgccgctggacctaccaaggcaacgctatgttctcttgcttttgtcagcaagatagccagatcaatgtcgatcgtggctggctcgaagatacctgcaagaatgtcattgcgctgccattctccaaattgcagttcgcgcttagctggataacgccacggaatgatgtcgtcgtgcacaacaatggtgacttctacagcgcggagaatctcgctctctccaggggaagccgaagtttccaaaaggtcgttgatcaaagctcgccgcgttgtttcatcaagccttacggtcaccgtaaccagcaaatcaatatcactgtgtggcttcaggccgccatccactgcggagccgtacaaatgtacggccagcaacgtcggttcgagatggcgctcgatgacgccaactacctctgatagttgagtcgatacttcggcgatcaccgcttccctcatactcttcctttttcaatattattgaagcatttatcagggttattgtctcatgagcggatacatat

SEQ ID NO: 160 - DNA, 4999 bp, synthetic construct
  source 1..4999: mol_type = other DNA
gcgtgagactgcggcgggcgctgcggacacatacaaagttacccacagattccgtggataagcaggggactaacatgtgaggcaaaacagcagggccgcgccggtggcgtttttccataggctccgccctcctgccagagttcacataaacagacgcttttccggtgcatctgtgggagccgtgaggctcaaccatgaatctgacagtacgggcgaaacccgacaggacttaaagatccccaccgtttccggcgggtcgctccctcttgcgctctcctgttccgaccctgccgtttaccggatacctgttccgcctttctcccttacgggaagtgtggcgctttctcatagctcacacactggtatctcggctcggtgtaggtcgttcgctccaagctgggctgtaagcaagaactccccgttcagcccgactgctgcgccttatccggtaactgttcacttgagtccaacccggaaaagcacggtaaaacgccactggcagcagccattggtaactgggagttcgcagaggatttgtttagctaaacacgcggttgctcttgaagtgtgcgccaaagtccggctacactggaaggacagatttggttgctgtgctctgcgaaagccagttaccacggttaagcagttccccaactgacttaaccttcgatcaaaccacctccccaggtggttttttcgtttacagggcaaaagattacgcgcagaaaaaaaggatctcaagaagatcctttgatcttttctactgaaccgctctagatttcagtgcaatttatctcttcaaatgtagcacctgaagtcagccccatacgatataagttgtaattctcatgttagtcatgccccgcgcccaccggaaggagctgactgggttgaaggctctcaagggcatcggtcgagatcccggtgcctaatgagtgagctaacttacattaattgcgttgcgctcactgcccgctttccagtcgggaaacctgtcgtgccagctgcattaatgaatcggccaacgcgcggggagaggcggtttgcgtattgggcgccagggtggtttttcttttcaccagtgagacgggcaacagctgattgcccttcaccgcctggccctgagagagttgcagcaagcggtccacgctggtttgccccagcaggcgaaaatcctgtttgatggtggttaacggcgggatataacatgagctgtcttcggtatcgtcgtatcccactaccgagatgtccgcaccaacgcgcagcccggactcggtaatggcgcgcattgcgcccagcgccatctgatcgttggcaaccagcatcgcagtgggaacgatgccctcattcagcatttgcatggtttgttgaaaaccggacatggcactccagtcgccttcccgttccgctatcggctgaatttgattgcgagtgagatatttatgccagccagccagacgcagacgcgccgagacagaacttaatgggcccgctaacagcgcgatttgctggtgacccaatgcgaccagatgctccacgcccagtcgcgtaccgtcttcatgggagaaaataatactgttgatgggtgtctggtcagagacatcaagaaataacgccggaacattagtgcaggcagcttccacagcaatggcatcctggtcatccagcggatagttaatgatcagcccactgacgcgttgcgcgagaagattgtgcaccgccgctttacaggcttcgacgccgcttcgttctaccatcgacaccaccacgctggcacccagttgatcggcgcgagatttaatcgccgcgacaatttgcgacggcgcgtgcagggccagactggaggtggcaacgccaatcagcaacgactgtttgcccgccagttgttgtgccacgcggttgggaatgtaattcagctccgccatcgccgcttccactttttcccgcgttttcgcagaaacgtggctggcctggttcaccacgcgggaaacggtctgataagagacaccggcatactctgcgacatcgtataacgttactggtttcacattcaccaccctgaattgactctcttccgggcgctatcatgccataccgcgaaaggttttgcgccattcgatggtgtccgggatttacactttatgcttccggctcgtatgttggtggagatatacctcgagttaagcgcggcttgtatcgaacaaagtctggcaaactaattaatgctgatgtcaatggcgcattaaacatcttaaagaaaagtaaagctgtagacctgagtgtcttatgctctagcggcgaagtggacacgcctcaaagaataaggattgcttgaagcagtcaaacttctttggaagcccccacttcaaattttcgctagaaaattaagtgggggtagttcacggacaagtggttcaccatgcgttgctttatggtatgatagctcgcggccgcaataactagcataaccccttggggcctctaaacgggtcttgaggggttttttgctgaagtcgacttaatacgactcactataggggaattgtgagcggataacaattcccaggtaccaaggagatataccatgggctatttttgcatcaagcagcagcttaatgggttgacgaaggaagagtacctgacactgcgtgagttgtgccatattgccaaaaacatgtacaacgttggcctttacaacgtacgtcagtactattttgagcataaggagttcttaaattacgaaaagaactatcacttggcgaagactaatgaaaactacaagttactgaactcgaacatggctcaacaaatcttgaaaaaagtaaatgaagccttcaaaagtttcttcggtcttatttcgcttgccaaacaaggtaaatacgaccataaagcaatctcgattcccaaatacttaaagaaagacggtttccattcgttaatcatcggccaaatccgcattgacggaaataagttcacgattccatactctcgcttattcaaaaagacacataagcccattacaatcactattccaccagtgttacttgataaaaagattaagcagatcgaaatcattccgaaacaccatgcacgtttcttcgagatccagtacaagtacgaaatgcctgaagatcagcgcgaacttaatgatcagaaggcgcttgcgattgacttggggcttaataacttggctacatgtgtaacctcagacggacgttctttcattattgacggccgtcgtcttaaatctatcaaccaatggttcaataaggaaaacgctcgcttgcagtctattaaagataaacagaagattaagggaaccacgcgtaaacaagcactgcttgcgatgaatcgtaataacaaggtgaacgactatatcaataagacctgccgctatatcattaactactgtatcgaaaatcaaattggcaagctggtaatcgggtacgccgaaacatggcagcgcaacatgaatttgggcaagaaaaccaaccaaaacttcgtcaatatccctcttggaaacattaaggagaagttagaatacctttgtgagttctatgggatcgagtttttgaagcaagaagagtcgtatacaagtcaagcgtcgttttttgatggagatgaaatccccgaatacaacgcggataatcccaaagagtacaaattttctggtaagcgcattaagcgcggcctgtatcgcactaaatcaggaaaacttattaacgcagacgtgaatggggcattgaatattttaaaaaaaagcaaggctgttgatttgtctgtcttgtgcagttctggtgaggtagacaccccgcaacgtattcgcatcgcgtgataacctaggctgctgccaccgctgagcaataactagcataaccccttggggcctctaaacgggtcttgaggggttttttgctgaaacctcaggcatttgagaagcacacggtcacactgcttccggtagtcaataaaccggtaaaccagcaatagacataagcggctatttaacgaccctgccctgaaccgacgaccgggtcatcgtggccggatcttgcggcccctcggcttgaacgaattgttagacattatttgccgactaccttggtgatctcgcctttcacgtagtggacaaattcttccaactgatctgcgcgcgaggccaagcgatcttcttcttgtccaagataagcctgtctagcttcaagtatgacgggctgatactgggccggcaggcgctccattgcccagtcggcagcgacatccttcggcgcgattttgccggttactgcgctgtaccaaatgcgggacaacgtaagcactacatttcgctcatcgccagcccagtcgggcggcgagttccatagcgttaaggtttcatttagcgcctcaaatagatcctgttcaggaaccggatcaaagagttcctccgccgctggacctaccaaggcaacgctatgttctcttgcttttgtcagcaagatagccagatcaatgtcgatcgtggctggctcgaagatacctgcaagaatgtcattgcgctgccattctccaaattgcagttcgcgcttagctggataacgccacggaatgatgtcgtcgtgcacaacaatggtgacttctacagcgcggagaatctcgctctctccaggggaagccgaagtttccaaaaggtcgttgatcaaagctcgccgcgttgtttcatcaagccttacggtcaccgtaaccagcaaatcaatatcactgtgtggcttcaggccgccatccactgcggagccgtacaaatgtacggccagcaacgtcggttcgagatggcgctcgatgacgccaactacctctgatagttgagtcgatacttcggcgatcaccgcttccctcatactcttcctttttcaatattattgaagcatttatcagggttattgtctcatgagcggatacatatttgaatgtatttagaaaaataaacaaatagctagctcactcggtcgctacgctccgg

SEQ ID NO: 161 - DNA, 5003 bp, synthetic construct
  source 1..5003: mol_type = other DNA
cattaattgcgttgcgctcactgcccgctttccagtcgggaaacctgtcgtgccagctgcattaatgaatcggccaacgcgcggggagaggcggtttgcgtattgggcgccagggtggtttttcttttcaccagtgagacgggcaacagctgattgcccttcaccgcctggccctgagagagttgcagcaagcggtccacgctggtttgccccagcaggcgaaaatcctgtttgatggtggttaacggcgggatataacatgagctgtcttcggtatcgtcgtatcccactaccgagatgtccgcaccaacgcgcagcccggactcggtaatggcgcgcattgcgcccagcgccatctgatcgttggcaaccagcatcgcagtgggaacgatgccctcattcagcatttgcatggtttgttgaaaaccggacatggcactccagtcgccttcccgttccgctatcggctgaatttgattgcgagtgagatatttatgccagccagccagacgcagacgcgccgagacagaacttaatgggcccgctaacagcgcgatttgctggtgacccaatgcgaccagatgctccacgcccagtcgcgtaccgtcttcatgggagaaaataatactgttgatgggtgtctggtcagagacatcaagaaataacgccggaacattagtgcaggcagcttccacagcaatggcatcctggtcatccagcggatagttaatgatcagcccactgacgcgttgcgcgagaagattgtgcaccgccgctttacaggcttcgacgccgcttcgttctaccatcgacaccaccacgctggcacccagttgatcggcgcgagatttaatcgccgcgacaatttgcgacggcgcgtgcagggccagactggaggtggcaacgccaatcagcaacgactgtttgcccgccagttgttgtgccacgcggttgggaatgtaattcagctccgccatcgccgcttccactttttcccgcgttttcgcagaaacgtggctggcctggttcaccacgcgggaaacggtctgataagagacaccggcatactctgcgacatcgtataacgttactggtttcacattcaccaccctgaattgactctcttccgggcgctatcatgccataccgcgaaaggttttgcgccattcgatggtgtccgggatttacggctagctcagtcctaggtactatgctagcgtggagatatacctcgagttaagcgcggcttgtatcgaacaaagtctggcaaactaattaatgctgatgtcaatggcgcattaaacatcttaaagaaaagtaaagctgtagacctgagtgtcttatgctctagcggcgaagtggacacgcctcaaagaataaggattgcttgaagcagtcaaacttctttggaagcccccacttcaaattttcgctagaaaattaagtgggggtagttcacggacaagtggttcaccatgcgttgctttatggtatgatagctcgcggccgcaataactagcataaccccttggggcctctaaacgggtcttgaggggttttttgctgaagtcgacttaatacgactcactataggggaattgtgagcggataacaattcccaggtaccaaggagatataccatgggctatttttgcatcaagcagcagcttaatgggttgacgaaggaagagtacctgacactgcgtgagttgtgccatattgccaaaaacatgtacaacgttggcctttacaacgtacgtcagtactattttgagcataaggagttcttaaattacgaaaagaactatcacttggcgaagactaatgaaaactacaagttactgaactcgaacatggctcaacaaatcttgaaaaaagtaaatgaagccttcaaaagtttcttcggtcttatttcgcttgccaaacaaggtaaatacgaccataaagcaatctcgattcccaaatacttaaagaaagacggtttccattcgttaatcatcggccaaatccgcattgacggaaataagttcacgattccatactctcgcttattcaaaaagacacataagcccattacaatcactattccaccagtgttacttgataaaaagattaagcagatcgaaatcattccgaaacaccatgcacgtttcttcgagatccagtacaagtacgaaatgcctgaagatcagcgcgaacttaatgatcagaaggcgcttgcgattgacttggggcttaataacttggctacatgtgtaacctcagacggacgttctttcattattgacggccgtcgtcttaaatctatcaaccaatggttcaataaggaaaacgctcgcttgcagtctattaaagataaacagaagattaagggaaccacgcgtaaacaagcactgcttgcgatgaatcgtaataacaaggtgaacgactatatcaataagacctgccgctatatcattaactactgtatcgaaaatcaaattggcaagctggtaatcgggtacgccgaaacatggcagcgcaacatgaatttgggcaagaaaaccaaccaaaacttcgtcaatatccctcttggaaacattaaggagaagttagaatacctttgtgagttctatgggatcgagtttttgaagcaagaagagtcgtatacaagtcaagcgtcgttttttgatggagatgaaatccccgaatacaacgcggataatcccaaagagtacaaattttctggtaagcgcattaagcgcggcctgtatcgcactaaatcaggaaaacttattaacgcagacgtgaatggggcattgaatattttaaaaaaaagcaaggctgttgatttgtctgtcttgtgcagttctggtgaggtagacaccccgcaacgtattcgcatcgcgtgataacctaggctgctgccaccgctgagcaataactagcataaccccttggggcctctaaacgggtcttgaggggttttttgctgaaacctcaggcatttgagaagcacacggtcacactgcttccggtagtcaataaaccggtaaaccagcaatagacataagcggctatttaacgaccctgccctgaaccgacgaccgggtcatcgtggccggatcttgcggcccctcggcttgaacgaattgttagacattatttgccgactaccttggtgatctcgcctttcacgtagtggacaaattcttccaactgatctgcgcgcgaggccaagcgatcttcttcttgtccaagataagcctgtctagcttcaagtatgacgggctgatactgggccggcaggcgctccattgcccagtcggcagcgacatccttcggcgcgattttgccggttactgcgctgtaccaaatgcgggacaacgtaagcactacatttcgctcatcgccagcccagtcgggcggcgagttccatagcgttaaggtttcatttagcgcctcaaatagatcctgttcaggaaccggatcaaagagttcctccgccgctggacctaccaaggcaacgctatgttctcttgcttttgtcagcaagatagccagatcaatgtcgatcgtggctggctcgaagatacctgcaagaatgtcattgcgctgccattctccaaattgcagttcgcgcttagctggataacgccacggaatgatgtcgtcgtgcacaacaatggtgacttctacagcgcggagaatctcgctctctccaggggaagccgaagtttccaaaaggtcgttgatcaaagctcgccgcgttgtttcatcaagccttacggtcaccgtaaccagcaaatcaatatcactgtgtggcttcaggccgccatccactgcggagccgtacaaatgtacggccagcaacgtcggttcgagatggcgctcgatgacgccaactacctctgatagttgagtcgatacttcggcgatcaccgcttccctcatactcttcctttttcaatattattgaagcatttatcagggttattgtctcatgagcggatacatatttgaatgtatttagaaaaataaacaaatagctagctcactcggtcgctacgctccgggcgtgagactgcggcgggcgctgcggacacatacaaagttacccacagattccgtggataagcaggggactaacatgtgaggcaaaacagcagggccgcgccggtggcgtttttccataggctccgccctcctgccagagttcacataaacagacgcttttccggtgcatctgtgggagccgtgaggctcaaccatgaatctgacagtacgggcgaaacccgacaggacttaaagatccccaccgtttccggcgggtcgctccctcttgcgctctcctgttccgaccctgccgtttaccggatacctgttccgcctttctcccttacgggaagtgtggcgctttctcatagctcacacactggtatctcggctcggtgtaggtcgttcgctccaagctgggctgtaagcaagaactccccgttcagcccgactgctgcgccttatccggtaactgttcacttgagtccaacccggaaaagcacggtaaaacgccactggcagcagccattggtaactgggagttcgcagaggatttgtttagctaaacacgcggttgctcttgaagtgtgcgccaaagtccggctacactggaaggacagatttggttgctgtgctctgcgaaagccagttaccacggttaagcagttccccaactgacttaaccttcgatcaaaccacctccccaggtggttttttcgtttacagggcaaaagattacgcgcagaaaaaaaggatctcaagaagatcctttgatcttttctactgaaccgctctagatttcagtgcaatttatctcttcaaatgtagcacctgaagtcagccccatacgatataagttgtaattctcatgttagtcatgccccgcgcccaccggaaggagctgactgggttgaaggctctcaagggcatcggtcgagatcccggtgcctaatgagtgagctaactta

SEQ ID NO: 162 - DNA, 5003 bp, synthetic construct
  source 1..5003: mol_type = other DNA
gcgtgagactgcggcgggcgctgcggacacatacaaagttacccacagattccgtggataagcaggggactaacatgtgaggcaaaacagcagggccgcgccggtggcgtttttccataggctccgccctcctgccagagttcacataaacagacgcttttccggtgcatctgtgggagccgtgaggctcaaccatgaatctgacagtacgggcgaaacccgacaggacttaaagatccccaccgtttccggcgggtcgctccctcttgcgctctcctgttccgaccctgccgtttaccggatacctgttccgcctttctcccttacgggaagtgtggcgctttctcatagctcacacactggtatctcggctcggtgtaggtcgttcgctccaagctgggctgtaagcaagaactccccgttcagcccgactgctgcgccttatccggtaactgttcacttgagtccaacccggaaaagcacggtaaaacgccactggcagcagccattggtaactgggagttcgcagaggatttgtttagctaaacacgcggttgctcttgaagtgtgcgccaaagtccggctacactggaaggacagatttggttgctgtgctctgcgaaagccagttaccacggttaagcagttccccaactgacttaaccttcgatcaaaccacctccccaggtggttttttcgtttacagggcaaaagattacgcgcagaaaaaaaggatctcaagaagatcctttgatcttttctactgaaccgctctagatttcagtgcaatttatctcttcaaatgtagcacctgaagtcagccccatacgatataagttgtaattctcatgttagtcatgccccgcgcccaccggaaggagctgactgggttgaaggctctcaagggcatcggtcgagatcccggtgcctaatgagtgagctaacttacattaattgcgttgcgctcactgcccgctttccagtcgggaaacctgtcgtgccagctgcattaatgaatcggccaacgcgcggggagaggcggtttgcgtattgggcgccagggtggtttttcttttcaccagtgagacgggcaacagctgattgcccttcaccgcctggccctgagagagttgcagcaagcggtccacgctggtttgccccagcaggcgaaaatcctgtttgatggtggttaacggcgggatataacatgagctgtcttcggtatcgtcgtatcccactaccgagatgtccgcaccaacgcgcagcccggactcggtaatggcgcgcattgcgcccagcgccatctgatcgttggcaaccagcatcgcagtgggaacgatgccctcattcagcatttgcatggtttgttgaaaaccggacatggcactccagtcgccttcccgttccgctatcggctgaatttgattgcgagtgagatatttatgccagccagccagacgcagacgcgccgagacagaacttaatgggcccgctaacagcgcgatttgctggtgacccaatgcgaccagatgctccacgcccagtcgcgtaccgtcttcatgggagaaaataatactgttgatgggtgtctggtcagagacatcaagaaataacgccggaacattagtgcaggcagcttccacagcaatggcatcctggtcatccagcggatagttaatgatcagcccactgacgcgttgcgcgagaagattgtgcaccgccgctttacaggcttcgacgccgcttcgttctaccatcgacaccaccacgctggcacccagttgatcggcgcgagatttaatcgccgcgacaatttgcgacggcgcgtgcagggccagactggaggtggcaacgccaatcagcaacgactgtttgcccgccagttgttgtgccacgcggttgggaatgtaattcagctccgccatcgccgcttccactttttcccgcgttttcgcagaaacgtggctggcctggttcaccacgcgggaaacggtctgataagagacaccggcatactctgcgacatcgtataacgttactggtttcacattcaccaccctgaattgactctcttccgggcgctatcatgccataccgcgaaaggttttgcgccattcgatggtgtccgggattgacagctagctcagtcctaggtataatgctagcgtggagatatacctcgagttaagcgcggcttgtatcgaacaaagtctggcaaactaattaatgctgatgtcaatggcgcattaaacatcttaaagaaaagtaaagctgtagacctgagtgtcttatgctctagcggcgaagtggacacgcctcaaagaataaggattgcttgaagcagtcaaacttctttggaagcccccacttcaaattttcgctagaaaattaagtgggggtagttcacggacaagtggttcaccatgcgttgctttatggtatgatagctcgcggccgcaataactagcataaccccttggggcctctaaacgggtcttgaggggttttttgctgaagtcgacttaatacgactcactataggggaattgtgagcggataacaattcccaggtaccaaggagatataccatgggctatttttgcatcaagcagcagcttaatgggttgacgaaggaagagtacctgacactgcgtgagttgtgccatattgccaaaaacatgtacaacgttggcctttacaacgtacgtcagtactattttgagcataaggagttcttaaattacgaaaagaactatcacttggcgaagactaatgaaaactacaagttactgaactcgaacatggctcaacaaatcttgaaaaaagtaaatgaagccttcaaaagtttcttcggtcttatttcgcttgccaaacaaggtaaatacgaccataaagcaatctcgattcccaaatacttaaagaaagacggtttccattcgttaatcatcggccaaatccgcattgacggaaataagttcacgattccatactctcgcttattcaaaaagacacataagcccattacaatcactattccaccagtgttacttgataaaaagattaagcagatcgaaatcattccgaaacaccatgcacgtttcttcgagatccagtacaagtacgaaatgcctgaagatcagcgcgaacttaatgatcagaaggcgcttgcgattgacttggggcttaataacttggctacatgtgtaacctcagacggacgttctttcattattgacggccgtcgtcttaaatctatcaaccaatggttcaataaggaaaacgctcgcttgcagtctattaaagataaacagaagattaagggaaccacgcgtaaacaagcactgcttgcgatgaatcgtaataacaaggtgaacgactatatcaataagacctgccgctatatcattaactactgtatcgaaaatcaaattggcaagctggtaatcgggtacgccgaaacatggcagcgcaacatgaatttgggcaagaaaaccaaccaaaacttcgtcaatatccctcttggaaacattaaggagaagttagaatacctttgtgagttctatgggatcgagtttttgaagcaagaagagtcgtatacaagtcaagcgtcgttttttgatggagatgaaatccccgaatacaacgcggataatcccaaagagtacaaattttctggtaagcgcattaagcgcggcctgtatcgcactaaatcaggaaaacttattaacgcagacgtgaatggggcattgaatattttaaaaaaaagcaaggctgttgatttgtctgtcttgtgcagttctggtgaggtagacaccccgcaacgtattcgcatcgcgtgataacctaggctgctgccaccgctgagcaataactagcataaccccttggggcctctaaacgggtcttgaggggttttttgctgaaacctcaggcatttgagaagcacacggtcacactgcttccggtagtcaataaaccggtaaaccagcaatagacataagcggctatttaacgaccctgccctgaaccgacgaccgggtcatcgtggccggatcttgcggcccctcggcttgaacgaattgttagacattatttgccgactaccttggtgatctcgcctttcacgtagtggacaaattcttccaactgatctgcgcgcgaggccaagcgatcttcttcttgtccaagataagcctgtctagcttcaagtatgacgggctgatactgggccggcaggcgctccattgcccagtcggcagcgacatccttcggcgcgattttgccggttactgcgctgtaccaaatgcgggacaacgtaagcactacatttcgctcatcgccagcccagtcgggcggcgagttccatagcgttaaggtttcatttagcgcctcaaatagatcctgttcaggaaccggatcaaagagttcctccgccgctggacctaccaaggcaacgctatgttctcttgcttttgtcagcaagatagccagatcaatgtcgatcgtggctggctcgaagatacctgcaagaatgtcattgcgctgccattctccaaattgcagttcgcgcttagctggataacgccacggaatgatgtcgtcgtgcacaacaatggtgacttctacagcgcggagaatctcgctctctccaggggaagccgaagtttccaaaaggtcgttgatcaaagctcgccgcgttgtttcatcaagccttacggtcaccgtaaccagcaaatcaatatcactgtgtggcttcaggccgccatccactgcggagccgtacaaatgtacggccagcaacgtcggttcgagatggcgctcgatgacgccaactacctctgatagttgagtcgatacttcggcgatcaccgcttccctcatactcttcctttttcaatattattgaagcatttatcagggttattgtctcatgagcggatacatatttgaatgtatttagaaaaataaacaaatagctagctcactcggtcgctacgctccgg

SEQ ID NO: 163 - DNA, 4996 bp, synthetic construct
  source 1..4996: mol_type = other DNA
tagaaaaataaacaaatagctagctcactcggtcgctacgctccgggcgtgagactgcggcgggcgctgcggacacatacaaagttacccacagattccgtggataagcaggggactaacatgtgaggcaaaacagcagggccgcgccggtggcgtttttccataggctccgccctcctgccagagttcacataaacagacgcttttccggtgcatctgtgggagccgtgaggctcaaccatgaatctgacagtacgggcgaaacccgacaggacttaaagatccccaccgtttccggcgggtcgctccctcttgcgctctcctgttccgaccctgccgtttaccggatacctgttccgcctttctcccttacgggaagtgtggcgctttctcatagctcacacactggtatctcggctcggtgtaggtcgttcgctccaagctgggctgtaagcaagaactccccgttcagcccgactgctgcgccttatccggtaactgttcacttgagtccaacccggaaaagcacggtaaaacgccactggcagcagccattggtaactgggagttcgcagaggatttgtttagctaaacacgcggttgctcttgaagtgtgcgccaaagtccggctacactggaaggacagatttggttgctgtgctctgcgaaagccagttaccacggttaagcagttccccaactgacttaaccttcgatcaaaccacctccccaggtggttttttcgtttacagggcaaaagattacgcgcagaaaaaaaggatctcaagaagatcctttgatcttttctactgaaccgctctagatttcagtgcaatttatctcttcaaatgtagcacctgaagtcagccccatacgatataagttgtaattctcatgttagtcatgccccgcgcccaccggaaggagctgactgggttgaaggctctcaagggcatcggtcgagatcccggtgcctaatgagtgagctaacttacattaattgcgttgcgctcactgcccgctttccagtcgggaaacctgtcgtgccagctgcattaatgaatcggccaacgcgcggggagaggcggtttgcgtattgggcgccagggtggtttttcttttcaccagtgagacgggcaacagctgattgcccttcaccgcctggccctgagagagttgcagcaagcggtccacgctggtttgccccagcaggcgaaaatcctgtttgatggtggttaacggcgggatataacatgagctgtcttcggtatcgtcgtatcccactaccgagatgtccgcaccaacgcgcagcccggactcggtaatggcgcgcattgcgcccagcgccatctgatcgttggcaaccagcatcgcagtgggaacgatgccctcattcagcatttgcatggtttgttgaaaaccggacatggcactccagtcgccttcccgttccgctatcggctgaatttgattgcgagtgagatatttatgccagccagccagacgcagacgcgccgagacagaacttaatgggcccgctaacagcgcgatttgctggtgacccaatgcgaccagatgctccacgcccagtcgcgtaccgtcttcatgggagaaaataatactgttgatgggtgtctggtcagagacatcaagaaataacgccggaacattagtgcaggcagcttccacagcaatggcatcctggtcatccagcggatagttaatgatcagcccactgacgcgttgcgcgagaagattgtgcaccgccgctttacaggcttcgacgccgcttcgttctaccatcgacaccaccacgctggcacccagttgatcggcgcgagatttaatcgccgcgacaatttgcgacggcgcgtgcagggccagactggaggtggcaacgccaatcagcaacgactgtttgcccgccagttgttgtgccacgcggttgggaatgtaattcagctccgccatcgccgcttccactttttcccgcgttttcgcagaaacgtggctggcctggttcaccacgcgggaaacggtctgataagagacaccggcatactctgcgacatcgtataacgttactggtttcacattcaccaccctgaattgactctcttccgggcgctatcatgccataccgcgaaaggttttgcgccattcgatggtgtccgggatttacactttatgcttccggctcgtatgttggtggagatatacctcgagttaagcgcggcttgtatcgaacaaagtctggcaaactaattaatgctgatgtcaatggcgcattaaacatcttaaagaaaagtaaagctgtagacctgagtgtcttatgctctagcggcgaagtggacacgcctcaaagaataaggattgcttgaagcagtcaaacttctttggaagcccccacttcaaattttcgctagaaaattaagtgggggtagttcacggacaagtggttcaccatgcgttgctttatggtatgatagctcgcggccgcaataactagcataaccccttggggcctctaaacgggtcttgaggggttttttgctgaagtcgacttttacactttatgcttccggctcgtatgttggtggagatatacggtaccaaggagatataccatgggctatttttgcatcaagcagcagcttaatgggttgacgaaggaagagtacctgacactgcgtgagttgtgccatattgccaaaaacatgtacaacgttggcctttacaacgtacgtcagtactattttgagcataaggagttcttaaattacgaaaagaactatcacttggcgaagactaatgaaaactacaagttactgaactcgaacatggctcaacaaatcttgaaaaaagtaaatgaagccttcaaaagtttcttcggtcttatttcgcttgccaaacaaggtaaatacgaccataaagcaatctcgattcccaaatacttaaagaaagacggtttccattcgttaatcatcggccaaatccgcattgacggaaataagttcacgattccatactctcgcttattcaaaaagacacataagcccattacaatcactattccaccagtgttacttgataaaaagattaagcagatcgaaatcattccgaaacaccatgcacgtttcttcgagatccagtacaagtacgaaatgcctgaagatcagcgcgaacttaatgatcagaaggcgcttgcgattgacttggggcttaataacttggctacatgtgtaacctcagacggacgttctttcattattgacggccgtcgtcttaaatctatcaaccaatggttcaataaggaaaacgctcgcttgcagtctattaaagataaacagaagattaagggaaccacgcgtaaacaagcactgcttgcgatgaatcgtaataacaaggtgaacgactatatcaataagacctgccgctatatcattaactactgtatcgaaaatcaaattggcaagctggtaatcgggtacgccgaaacatggcagcgcaacatgaatttgggcaagaaaaccaaccaaaacttcgtcaatatccctcttggaaacattaaggagaagttagaatacctttgtgagttctatgggatcgagtttttgaagcaagaagagtcgtatacaagtcaagcgtcgttttttgatggagatgaaatccccgaatacaacgcggataatcccaaagagtacaaattttctggtaagcgcattaagcgcggcctgtatcgcactaaatcaggaaaacttattaacgcagacgtgaatggggcattgaatattttaaaaaaaagcaaggctgttgatttgtctgtcttgtgcagttctggtgaggtagacaccccgcaacgtattcgcatcgcgtgataacctaggctgctgccaccgctgagcaataactagcataaccccttggggcctctaaacgggtcttgaggggttttttgctgaaacctcaggcatttgagaagcacacggtcacactgcttccggtagtcaataaaccggtaaaccagcaatagacataagcggctatttaacgaccctgccctgaaccgacgaccgggtcatcgtggccggatcttgcggcccctcggcttgaacgaattgttagacattatttgccgactaccttggtgatctcgcctttcacgtagtggacaaattcttccaactgatctgcgcgcgaggccaagcgatcttcttcttgtccaagataagcctgtctagcttcaagtatgacgggctgatactgggccggcaggcgctccattgcccagtcggcagcgacatccttcggcgcgattttgccggttactgcgctgtaccaaatgcgggacaacgtaagcactacatttcgctcatcgccagcccagtcgggcggcgagttccatagcgttaaggtttcatttagcgcctcaaatagatcctgttcaggaaccggatcaaagagttcctccgccgctggacctaccaaggcaacgctatgttctcttgcttttgtcagcaagatagccagatcaatgtcgatcgtggctggctcgaagatacctgcaagaatgtcattgcgctgccattctccaaattgcagttcgcgcttagctggataacgccacggaatgatgtcgtcgtgcacaacaatggtgacttctacagcgcggagaatctcgctctctccaggggaagccgaagtttccaaaaggtcgttgatcaaagctcgccgcgttgtttcatcaagccttacggtcaccgtaaccagcaaatcaatatcactgtgtggcttcaggccgccatccactgcggagccgtacaaatgtacggccagcaacgtcggttcgagatggcgctcgatgacgccaactacctctgatagttgagtcgatacttcggcgatcaccgcttccctcatactcttcctttttcaatattattgaagcatttatcagggttattgtctcatgagcggatacatatttgaatgtatt

SEQ ID NO: 164 - DNA, 5000 bp, synthetic construct
  source 1..5000: mol_type = other DNA
aaaaataaacaaatagctagctcactcggtcgctacgctccgggcgtgagactgcggcgggcgctgcggacacatacaaagttacccacagattccgtggataagcaggggactaacatgtgaggcaaaacagcagggccgcgccggtggcgtttttccataggctccgccctcctgccagagttcacataaacagacgcttttccggtgcatctgtgggagccgtgaggctcaaccatgaatctgacagtacgggcgaaacccgacaggacttaaagatccccaccgtttccggcgggtcgctccctcttgcgctctcctgttccgaccctgccgtttaccggatacctgttccgcctttctcccttacgggaagtgtggcgctttctcatagctcacacactggtatctcggctcggtgtaggtcgttcgctccaagctgggctgtaagcaagaactccccgttcagcccgactgctgcgccttatccggtaactgttcacttgagtccaacccggaaaagcacggtaaaacgccactggcagcagccattggtaactgggagttcgcagaggatttgtttagctaaacacgcggttgctcttgaagtgtgcgccaaagtccggctacactggaaggacagatttggttgctgtgctctgcgaaagccagttaccacggttaagcagttccccaactgacttaaccttcgatcaaaccacctccccaggtggttttttcgtttacagggcaaaagattacgcgcagaaaaaaaggatctcaagaagatcctttgatcttttctactgaaccgctctagatttcagtgcaatttatctcttcaaatgtagcacctgaagtcagccccatacgatataagttgtaattctcatgttagtcatgccccgcgcccaccggaaggagctgactgggttgaaggctctcaagggcatcggtcgagatcccggtgcctaatgagtgagctaacttacattaattgcgttgcgctcactgcccgctttccagtcgggaaacctgtcgtgccagctgcattaatgaatcggccaacgcgcggggagaggcggtttgcgtattgggcgccagggtggtttttcttttcaccagtgagacgggcaacagctgattgcccttcaccgcctggccctgagagagttgcagcaagcggtccacgctggtttgccccagcaggcgaaaatcctgtttgatggtggttaacggcgggatataacatgagctgtcttcggtatcgtcgtatcccactaccgagatgtccgcaccaacgcgcagcccggactcggtaatggcgcgcattgcgcccagcgccatctgatcgttggcaaccagcatcgcagtgggaacgatgccctcattcagcatttgcatggtttgttgaaaaccggacatggcactccagtcgccttcccgttccgctatcggctgaatttgattgcgagtgagatatttatgccagccagccagacgcagacgcgccgagacagaacttaatgggcccgctaacagcgcgatttgctggtgacccaatgcgaccagatgctccacgcccagtcgcgtaccgtcttcatgggagaaaataatactgttgatgggtgtctggtcagagacatcaagaaataacgccggaacattagtgcaggcagcttccacagcaatggcatcctggtcatccagcggatagttaatgatcagcccactgacgcgttgcgcgagaagattgtgcaccgccgctttacaggcttcgacgccgcttcgttctaccatcgacaccaccacgctggcacccagttgatcggcgcgagatttaatcgccgcgacaatttgcgacggcgcgtgcagggccagactggaggtggcaacgccaatcagcaacgactgtttgcccgccagttgttgtgccacgcggttgggaatgtaattcagctccgccatcgccgcttccactttttcccgcgttttcgcagaaacgtggctggcctggttcaccacgcgggaaacggtctgataagagacaccggcatactctgcgacatcgtataacgttactggtttcacattcaccaccctgaattgactctcttccgggcgctatcatgccataccgcgaaaggttttgcgccattcgatggtgtccgggatttacactttatgcttccggctcgtatgttggtggagatatacctcgagttaagcgcggcttgtatcgaacaaagtctggcaaactaattaatgctgatgtcaatggcgcattaaacatcttaaagaaaagtaaagctgtagacctgagtgtcttatgctctagcggcgaagtggacacgcctcaaagaataaggattgcttgaagcagtcaaacttctttggaagcccccacttcaaattttcgctagaaaattaagtgggggtagttcacggacaagtggttcaccatgcgttgctttatggtatgatagctcgcggccgcaataactagcataaccccttggggcctctaaacgggtcttgaggggttttttgctgaagtcgacttttacggctagctcagtcctaggtactatgctagcgtggagatatacggtaccaaggagatataccatgggctatttttgcatcaagcagcagcttaatgggttgacgaaggaagagtacctgacactgcgtgagttgtgccatattgccaaaaacatgtacaacgttggcctttacaacgtacgtcagtactattttgagcataaggagttcttaaattacgaaaagaactatcacttggcgaagactaatgaaaactacaagttactgaactcgaacatggctcaacaaatcttgaaaaaagtaaatgaagccttcaaaagtttcttcggtcttatttcgcttgccaaacaaggtaaatacgaccataaagcaatctcgattcccaaatacttaaagaaagacggtttccattcgttaatcatcggccaaatccgcattgacggaaataagttcacgattccatactctcgcttattcaaaaagacacataagcccattacaatcactattccaccagtgttacttgataaaaagattaagcagatcgaaatcattccgaaacaccatgcacgtttcttcgagatccagtacaagtacgaaatgcctgaagatcagcgcgaacttaatgatcagaaggcgcttgcgattgacttggggcttaataacttggctacatgtgtaacctcagacggacgttctttcattattgacggccgtcgtcttaaatctatcaaccaatggttcaataaggaaaacgctcgcttgcagtctattaaagataaacagaagattaagggaaccacgcgtaaacaagcactgcttgcgatgaatcgtaataacaaggtgaacgactatatcaataagacctgccgctatatcattaactactgtatcgaaaatcaaattggcaagctggtaatcgggtacgccgaaacatggcagcgcaacatgaatttgggcaagaaaaccaaccaaaacttcgtcaatatccctcttggaaacattaaggagaagttagaatacctttgtgagttctatgggatcgagtttttgaagcaagaagagtcgtatacaagtcaagcgtcgttttttgatggagatgaaatccccgaatacaacgcggataatcccaaagagtacaaattttctggtaagcgcattaagcgcggcctgtatcgcactaaatcaggaaaacttattaacgcagacgtgaatggggcattgaatattttaaaaaaaagcaaggctgttgatttgtctgtcttgtgcagttctggtgaggtagacaccccgcaacgtattcgcatcgcgtgataacctaggctgctgccaccgctgagcaataactagcataaccccttggggcctctaaacgggtcttgaggggttttttgctgaaacctcaggcatttgagaagcacacggtcacactgcttccggtagtcaataaaccggtaaaccagcaatagacataagcggctatttaacgaccctgccctgaaccgacgaccgggtcatcgtggccggatcttgcggcccctcggcttgaacgaattgttagacattatttgccgactaccttggtgatctcgcctttcacgtagtggacaaattcttccaactgatctgcgcgcgaggccaagcgatcttcttcttgtccaagataagcctgtctagcttcaagtatgacgggctgatactgggccggcaggcgctccattgcccagtcggcagcgacatccttcggcgcgattttgccggttactgcgctgtaccaaatgcgggacaacgtaagcactacatttcgctcatcgccagcccagtcgggcggcgagttccatagcgttaaggtttcatttagcgcctcaaatagatcctgttcaggaaccggatcaaagagttcctccgccgctggacctaccaaggcaacgctatgttctcttgcttttgtcagcaagatagccagatcaatgtcgatcgtggctggctcgaagatacctgcaagaatgtcattgcgctgccattctccaaattgcagttcgcgcttagctggataacgccacggaatgatgtcgtcgtgcacaacaatggtgacttctacagcgcggagaatctcgctctctccaggggaagccgaagtttccaaaaggtcgttgatcaaagctcgccgcgttgtttcatcaagccttacggtcaccgtaaccagcaaatcaatatcactgtgtggcttcaggccgccatccactgcggagccgtacaaatgtacggccagcaacgtcggttcgagatggcgctcgatgacgccaactacctctgatagttgagtcgatacttcggcgatcaccgcttccctcatactcttcctttttcaatattattgaagcatttatcagggttattgtctcatgagcggatacatatttgaatgtatttag

SEQ ID NO: 165 - DNA, 5000 bp, synthetic construct
  source 1..5000: mol_type = other DNA
tcggtaatggcgcgcattgcgcccagcgccatctgatcgttggcaaccagcatcgcagtgggaacgatgccctcattcagcatttgcatggtttgttgaaaaccggacatggcactccagtcgccttcccgttccgctatcggctgaatttgattgcgagtgagatatttatgccagccagccagacgcagacgcgccgagacagaacttaatgggcccgctaacagcgcgatttgctggtgacccaatgcgaccagatgctccacgcccagtcgcgtaccgtcttcatgggagaaaataatactgttgatgggtgtctggtcagagacatcaagaaataacgccggaacattagtgcaggcagcttccacagcaatggcatcctggtcatccagcggatagttaatgatcagcccactgacgcgttgcgcgagaagattgtgcaccgccgctttacaggcttcgacgccgcttcgttctaccatcgacaccaccacgctggcacccagttgatcggcgcgagatttaatcgccgcgacaatttgcgacggcgcgtgcagggccagactggaggtggcaacgccaatcagcaacgactgtttgcccgccagttgttgtgccacgcggttgggaatgtaattcagctccgccatcgccgcttccactttttcccgcgttttcgcagaaacgtggctggcctggttcaccacgcgggaaacggtctgataagagacaccggcatactctgcgacatcgtataacgttactggtttcacattcaccaccctgaattgactctcttccgggcgctatcatgccataccgcgaaaggttttgcgccattcgatggtgtccgggatttacactttatgcttccggctcgtatgttggtggagatatacctcgagttaagcgcggcttgtatcgaacaaagtctggcaaactaattaatgctgatgtcaatggcgcattaaacatcttaaagaaaagtaaagctgtagacctgagtgtcttatgctctagcggcgaagtggacacgcctcaaagaataaggattgcttgaagcagtcaaacttctttggaagcccccacttcaaattttcgctagaaaattaagtgggggtagttcacggacaagtggttcaccatgcgttgctttatggtatgatagctcgcggccgcaataactagcataaccccttggggcctctaaacgggtcttgaggggttttttgctgaagtcgactttgacagctagctcagtcctaggtataatgctagcgtggagatatacggtaccaaggagatataccatgggctatttttgcatcaagcagcagcttaatgggttgacgaaggaagagtacctgacactgcgtgagttgtgccatattgccaaaaacatgtacaacgttggcctttacaacgtacgtcagtactattttgagcataaggagttcttaaattacgaaaagaactatcacttggcgaagactaatgaaaactacaagttactgaactcgaacatggctcaacaaatcttgaaaaaagtaaatgaagccttcaaaagtttcttcggtcttatttcgcttgccaaacaaggtaaatacgaccataaagcaatctcgattcccaaatacttaaagaaagacggtttccattcgttaatcatcggccaaatccgcattgacggaaataagttcacgattccatactctcgcttattcaaaaagacacataagcccattacaatcactattccaccagtgttacttgataaaaagattaagcagatcgaaatcattccgaaacaccatgcacgtttcttcgagatccagtacaagtacgaaatgcctgaagatcagcgcgaacttaatgatcagaaggcgcttgcgattgacttggggcttaataacttggctacatgtgtaacctcagacggacgttctttcattattgacggccgtcgtcttaaatctatcaaccaatggttcaataaggaaaacgctcgcttgcagtctattaaagataaacagaagattaagggaaccacgcgtaaacaagcactgcttgcgatgaatcgtaataacaaggtgaacgactatatcaataagacctgccgctatatcattaactactgtatcgaaaatcaaattggcaagctggtaatcgggtacgccgaaacatggcagcgcaacatgaatttgggcaagaaaaccaaccaaaacttcgtcaatatccctcttggaaacattaaggagaagttagaatacctttgtgagttctatgggatcgagtttttgaagcaagaagagtcgtatacaagtcaagcgtcgttttttgatggagatgaaatccccgaatacaacgcggataatcccaaagagtacaaattttctggtaagcgcattaagcgcggcctgtatcgcactaaatcaggaaaacttattaacgcagacgtgaatggggcattgaatattttaaaaaaaagcaaggctgttgatttgtctgtcttgtgcagttctggtgaggtagacaccccgcaacgtattcgcatcgcgtgataacctaggctgctgccaccgctgagcaataactagcataaccccttggggcctctaaacgggtcttgaggggttttttgctgaaacctcaggcatttgagaagcacacggtcacactgcttccggtagtcaataaaccggtaaaccagcaatagacataagcggctatttaacgaccctgccctgaaccgacgaccgggtcatcgtggccggatcttgcggcccctcggcttgaacgaattgttagacattatttgccgactaccttggtgatctcgcctttcacgtagtggacaaattcttccaactgatctgcgcgcgaggccaagcgatcttcttcttgtccaagataagcctgtctagcttcaagtatgacgggctgatactgggccggcaggcgctccattgcccagtcggcagcgacatccttcggcgcgattttgccggttactgcgctgtaccaaatgcgggacaacgtaagcactacatttcgctcatcgccagcccagtcgggcggcgagttccatagcgttaaggtttcatttagcgcctcaaatagatcctgttcaggaaccggatcaaagagttcctccgccgctggacctaccaaggcaacgctatgttctcttgcttttgtcagcaagatagccagatcaatgtcgatcgtggctggctcgaagatacctgcaagaatgtcattgcgctgccattctccaaattgcagttcgcgcttagctggataacgccacggaatgatgtcgtcgtgcacaacaatggtgacttctacagcgcggagaatctcgctctctccaggggaagccgaagtttccaaaaggtcgttgatcaaagctcgccgcgttgtttcatcaagccttacggtcaccgtaaccagcaaatcaatatcactgtgtggcttcaggccgccatccactgcggagccgtacaaatgtacggccagcaacgtcggttcgagatggcgctcgatgacgccaactacctctgatagttgagtcgatacttcggcgatcaccgcttccctcatactcttcctttttcaatattattgaagcatttatcagggttattgtctcatgagcggatacatatttgaatgtatttagaaaaataaacaaatagctagctcactcggtcgctacgctccgggcgtgagactgcggcgggcgctgcggacacatacaaagttacccacagattccgtggataagcaggggactaacatgtgaggcaaaacagcagggccgcgccggtggcgtttttccataggctccgccctcctgccagagttcacataaacagacgcttttccggtgcatctgtgggagccgtgaggctcaaccatgaatctgacagtacgggcgaaacccgacaggacttaaagatccccaccgtttccggcgggtcgctccctcttgcgctctcctgttccgaccctgccgtttaccggatacctgttccgcctttctcccttacgggaagtgtggcgctttctcatagctcacacactggtatctcggctcggtgtaggtcgttcgctccaagctgggctgtaagcaagaactccccgttcagcccgactgctgcgccttatccggtaactgttcacttgagtccaacccggaaaagcacggtaaaacgccactggcagcagccattggtaactgggagttcgcagaggatttgtttagctaaacacgcggttgctcttgaagtgtgcgccaaagtccggctacactggaaggacagatttggttgctgtgctctgcgaaagccagttaccacggttaagcagttccccaactgacttaaccttcgatcaaaccacctccccaggtggttttttcgtttacagggcaaaagattacgcgcagaaaaaaaggatctcaagaagatcctttgatcttttctactgaaccgctctagatttcagtgcaatttatctcttcaaatgtagcacctgaagtcagccccatacgatataagttgtaattctcatgttagtcatgccccgcgcccaccggaaggagctgactgggttgaaggctctcaagggcatcggtcgagatcccggtgcctaatgagtgagctaacttacattaattgcgttgcgctcactgcccgctttccagtcgggaaacctgtcgtgccagctgcattaatgaatcggccaacgcgcggggagaggcggtttgcgtattgggcgccagggtggtttttcttttcaccagtgagacgggcaacagctgattgcccttcaccgcctggccctgagagagttgcagcaagcggtccacgctggtttgccccagcaggcgaaaatcctgtttgatggtggttaacggcgggatataacatgagctgtcttcggtatcgtcgtatcccactaccgagatgtccgcaccaacgcgcagcccggac

SEQ ID NO: 166 - DNA, 5000 bp, synthetic construct
  source 1..5000: mol_type = other DNA
agaaaaataaacaaatagctagctcactcggtcgctacgctccgggcgtgagactgcggcgggcgctgcggacacatacaaagttacccacagattccgtggataagcaggggactaacatgtgaggcaaaacagcagggccgcgccggtggcgtttttccataggctccgccctcctgccagagttcacataaacagacgcttttccggtgcatctgtgggagccgtgaggctcaaccatgaatctgacagtacgggcgaaacccgacaggacttaaagatccccaccgtttccggcgggtcgctccctcttgcgctctcctgttccgaccctgccgtttaccggatacctgttccgcctttctcccttacgggaagtgtggcgctttctcatagctcacacactggtatctcggctcggtgtaggtcgttcgctccaagctgggctgtaagcaagaactccccgttcagcccgactgctgcgccttatccggtaactgttcacttgagtccaacccggaaaagcacggtaaaacgccactggcagcagccattggtaactgggagttcgcagaggatttgtttagctaaacacgcggttgctcttgaagtgtgcgccaaagtccggctacactggaaggacagatttggttgctgtgctctgcgaaagccagttaccacggttaagcagttccccaactgacttaaccttcgatcaaaccacctccccaggtggttttttcgtttacagggcaaaagattacgcgcagaaaaaaaggatctcaagaagatcctttgatcttttctactgaaccgctctagatttcagtgcaatttatctcttcaaatgtagcacctgaagtcagccccatacgatataagttgtaattctcatgttagtcatgccccgcgcccaccggaaggagctgactgggttgaaggctctcaagggcatcggtcgagatcccggtgcctaatgagtgagctaacttacattaattgcgttgcgctcactgcccgctttccagtcgggaaacctgtcgtgccagctgcattaatgaatcggccaacgcgcggggagaggcggtttgcgtattgggcgccagggtggtttttcttttcaccagtgagacgggcaacagctgattgcccttcaccgcctggccctgagagagttgcagcaagcggtccacgctggtttgccccagcaggcgaaaatcctgtttgatggtggttaacggcgggatataacatgagctgtcttcggtatcgtcgtatcccactaccgagatgtccgcaccaacgcgcagcccggactcggtaatggcgcgcattgcgcccagcgccatctgatcgttggcaaccagcatcgcagtgggaacgatgccctcattcagcatttgcatggtttgttgaaaaccggacatggcactccagtcgccttcccgttccgctatcggctgaatttgattgcgagtgagatatttatgccagccagccagacgcagacgcgccgagacagaacttaatgggcccgctaacagcgcgatttgctggtgacccaatgcgaccagatgctccacgcccagtcgcgtaccgtcttcatgggagaaaataatactgttgatgggtgtctggtcagagacatcaagaaataacgccggaacattagtgcaggcagcttccacagcaatggcatcctggtcatccagcggatagttaatgatcagcccactgacgcgttgcgcgagaagattgtgcaccgccgctttacaggcttcgacgccgcttcgttctaccatcgacaccaccacgctggcacccagttgatcggcgcgagatttaatcgccgcgacaatttgcgacggcgcgtgcagggccagactggaggtggcaacgccaatcagcaacgactgtttgcccgccagttgttgtgccacgcggttgggaatgtaattcagctccgccatcgccgcttccactttttcccgcgttttcgcagaaacgtggctggcctggttcaccacgcgggaaacggtctgataagagacaccggcatactctgcgacatcgtataacgttactggtttcacattcaccaccctgaattgactctcttccgggcgctatcatgccataccgcgaaaggttttgcgccattcgatggtgtccgggatttacggctagctcagtcctaggtactatgctagcgtggagatatacctcgagttaagcgcggcttgtatcgaacaaagtctggcaaactaattaatgctgatgtcaatggcgcattaaacatcttaaagaaaagtaaagctgtagacctgagtgtcttatgctctagcggcgaagtggacacgcctcaaagaataaggattgcttgaagcagtcaaacttctttggaagcccccacttcaaattttcgctagaaaattaagtgggggtagttcacggacaagtggttcaccatgcgttgctttatggtatgatagctcgcggccgcaataactagcataaccccttggggcctctaaacgggtcttgaggggttttttgctgaagtcgacttttacactttatgcttccggctcgtatgttggtggagatatacggtaccaaggagatataccatgggctatttttgcatcaagcagcagcttaatgggttgacgaaggaagagtacctgacactgcgtgagttgtgccatattgccaaaaacatgtacaacgttggcctttacaacgtacgtcagtactattttgagcataaggagttcttaaattacgaaaagaactatcacttggcgaagactaatgaaaactacaagttactgaactcgaacatggctcaacaaatcttgaaaaaagtaaatgaagccttcaaaagtttcttcggtcttatttcgcttgccaaacaaggtaaatacgaccataaagcaatctcgattcccaaatacttaaagaaagacggtttccattcgttaatcatcggccaaatccgcattgacggaaataagttcacgattccatactctcgcttattcaaaaagacacataagcccattacaatcactattccaccagtgttacttgataaaaagattaagcagatcgaaatcattccgaaacaccatgcacgtttcttcgagatccagtacaagtacgaaatgcctgaagatcagcgcgaacttaatgatcagaaggcgcttgcgattgacttggggcttaataacttggctacatgtgtaacctcagacggacgttctttcattattgacggccgtcgtcttaaatctatcaaccaatggttcaataaggaaaacgctcgcttgcagtctattaaagataaacagaagattaagggaaccacgcgtaaacaagcactgcttgcgatgaatcgtaataacaaggtgaacgactatatcaataagacctgccgctatatcattaactactgtatcgaaaatcaaattggcaagctggtaatcgggtacgccgaaacatggcagcgcaacatgaatttgggcaagaaaaccaaccaaaacttcgtcaatatccctcttggaaacattaaggagaagttagaatacctttgtgagttctatgggatcgagtttttgaagcaagaagagtcgtatacaagtcaagcgtcgttttttgatggagatgaaatccccgaatacaacgcggataatcccaaagagtacaaattttctggtaagcgcattaagcgcggcctgtatcgcactaaatcaggaaaacttattaacgcagacgtgaatggggcattgaatattttaaaaaaaagcaaggctgttgatttgtctgtcttgtgcagttctggtgaggtagacaccccgcaacgtattcgcatcgcgtgataacctaggctgctgccaccgctgagcaataactagcataaccccttggggcctctaaacgggtcttgaggggttttttgctgaaacctcaggcatttgagaagcacacggtcacactgcttccggtagtcaataaaccggtaaaccagcaatagacataagcggctatttaacgaccctgccctgaaccgacgaccgggtcatcgtggccggatcttgcggcccctcggcttgaacgaattgttagacattatttgccgactaccttggtgatctcgcctttcacgtagtggacaaattcttccaactgatctgcgcgcgaggccaagcgatcttcttcttgtccaagataagcctgtctagcttcaagtatgacgggctgatactgggccggcaggcgctccattgcccagtcggcagcgacatccttcggcgcgattttgccggttactgcgctgtaccaaatgcgggacaacgtaagcactacatttcgctcatcgccagcccagtcgggcggcgagttccatagcgttaaggtttcatttagcgcctcaaatagatcctgttcaggaaccggatcaaagagttcctccgccgctggacctaccaaggcaacgctatgttctcttgcttttgtcagcaagatagccagatcaatgtcgatcgtggctggctcgaagatacctgcaagaatgtcattgcgctgccattctccaaattgcagttcgcgcttagctggataacgccacggaatgatgtcgtcgtgcacaacaatggtgacttctacagcgcggagaatctcgctctctccaggggaagccgaagtttccaaaaggtcgttgatcaaagctcgccgcgttgtttcatcaagccttacggtcaccgtaaccagcaaatcaatatcactgtgtggcttcaggccgccatccactgcggagccgtacaaatgtacggccagcaacgtcggttcgagatggcgctcgatgacgccaactacctctgatagttgagtcgatacttcggcgatcaccgcttccctcatactcttcctttttcaatattattgaagcatttatcagggttattgtctcatgagcggatacatatttgaatgtattt

SEQ ID NO: 167 - DNA, 5004 bp, synthetic construct
  source 1..5004: mol_type = other DNA
ttagaaaaataaacaaatagctagctcactcggtcgctacgctccgggcgtgagactgcggcgggcgctgcggacacatacaaagttacccacagattccgtggataagcaggggactaacatgtgaggcaaaacagcagggccgcgccggtggcgtttttccataggctccgccctcctgccagagttcacataaacagacgcttttccggtgcatctgtgggagccgtgaggctcaaccatgaatctgacagtacgggcgaaacccgacaggacttaaagatccccaccgtttccggcgggtcgctccctcttgcgctctcctgttccgaccctgccgtttaccggatacctgttccgcctttctcccttacgggaagtgtggcgctttctcatagctcacacactggtatctcggctcggtgtaggtcgttcgctccaagctgggctgtaagcaagaactccccgttcagcccgactgctgcgccttatccggtaactgttcacttgagtccaacccggaaaagcacggtaaaacgccactggcagcagccattggtaactgggagttcgcagaggatttgtttagctaaacacgcggttgctcttgaagtgtgcgccaaagtccggctacactggaaggacagatttggttgctgtgctctgcgaaagccagttaccacggttaagcagttccccaactgacttaaccttcgatcaaaccacctccccaggtggttttttcgtttacagggcaaaagattacgcgcagaaaaaaaggatctcaagaagatcctttgatcttttctactgaaccgctctagatttcagtgcaatttatctcttcaaatgtagcacctgaagtcagccccatacgatataagttgtaattctcatgttagtcatgccccgcgcccaccggaaggagctgactgggttgaaggctctcaagggcatcggtcgagatcccggtgcctaatgagtgagctaacttacattaattgcgttgcgctcactgcccgctttccagtcgggaaacctgtcgtgccagctgcattaatgaatcggccaacgcgcggggagaggcggtttgcgtattgggcgccagggtggtttttcttttcaccagtgagacgggcaacagctgattgcccttcaccgcctggccctgagagagttgcagcaagcggtccacgctggtttgccccagcaggcgaaaatcctgtttgatggtggttaacggcgggatataacatgagctgtcttcggtatcgtcgtatcccactaccgagatgtccgcaccaacgcgcagcccggactcggtaatggcgcgcattgcgcccagcgccatctgatcgttggcaaccagcatcgcagtgggaacgatgccctcattcagcatttgcatggtttgttgaaaaccggacatggcactccagtcgccttcccgttccgctatcggctgaatttgattgcgagtgagatatttatgccagccagccagacgcagacgcgccgagacagaacttaatgggcccgctaacagcgcgatttgctggtgacccaatgcgaccagatgctccacgcccagtcgcgtaccgtcttcatgggagaaaataatactgttgatgggtgtctggtcagagacatcaagaaataacgccggaacattagtgcaggcagcttccacagcaatggcatcctggtcatccagcggatagttaatgatcagcccactgacgcgttgcgcgagaagattgtgcaccgccgctttacaggcttcgacgccgcttcgttctaccatcgacaccaccacgctggcacccagttgatcggcgcgagatttaatcgccgcgacaatttgcgacggcgcgtgcagggccagactggaggtggcaacgccaatcagcaacgactgtttgcccgccagttgttgtgccacgcggttgggaatgtaattcagctccgccatcgccgcttccactttttcccgcgttttcgcagaaacgtggctggcctggttcaccacgcgggaaacggtctgataagagacaccggcatactctgcgacatcgtataacgttactggtttcacattcaccaccctgaattgactctcttccgggcgctatcatgccataccgcgaaaggttttgcgccattcgatggtgtccgggatttacggctagctcagtcctaggtactatgctagcgtggagatatacctcgagttaagcgcggcttgtatcgaacaaagtctggcaaactaattaatgctgatgtcaatggcgcattaaacatcttaaagaaaagtaaagctgtagacctgagtgtcttatgctctagcggcgaagtggacacgcctcaaagaataaggattgcttgaagcagtcaaacttctttggaagcccccacttcaaattttcgctagaaaattaagtgggggtagttcacggacaagtggttcaccatgcgttgctttatggtatgatagctcgcggccgcaataactagcataaccccttggggcctctaaacgggtcttgaggggttttttgctgaagtcgacttttacggctagctcagtcctaggtactatgctagcgtggagatatacggtaccaaggagatataccatgggctatttttgcatcaagcagcagcttaatgggttgacgaaggaagagtacctgacactgcgtgagttgtgccatattgccaaaaacatgtacaacgttggcctttacaacgtacgtcagtactattttgagcataaggagttcttaaattacgaaaagaactatcacttggcgaagactaatgaaaactacaagttactgaactcgaacatggctcaacaaatcttgaaaaaagtaaatgaagccttcaaaagtttcttcggtcttatttcgcttgccaaacaaggtaaatacgaccataaagcaatctcgattcccaaatacttaaagaaagacggtttccattcgttaatcatcggccaaatccgcattgacggaaataagttcacgattccatactctcgcttattcaaaaagacacataagcccattacaatcactattccaccagtgttacttgataaaaagattaagcagatcgaaatcattccgaaacaccatgcacgtttcttcgagatccagtacaagtacgaaatgcctgaagatcagcgcgaacttaatgatcagaaggcgcttgcgattgacttggggcttaataacttggctacatgtgtaacctcagacggacgttctttcattattgacggccgtcgtcttaaatctatcaaccaatggttcaataaggaaaacgctcgcttgcagtctattaaagataaacagaagattaagggaaccacgcgtaaacaagcactgcttgcgatgaatcgtaataacaaggtgaacgactatatcaataagacctgccgctatatcattaactactgtatcgaaaatcaaattggcaagctggtaatcgggtacgccgaaacatggcagcgcaacatgaatttgggcaagaaaaccaaccaaaacttcgtcaatatccctcttggaaacattaaggagaagttagaatacctttgtgagttctatgggatcgagtttttgaagcaagaagagtcgtatacaagtcaagcgtcgttttttgatggagatgaaatccccgaatacaacgcggataatcccaaagagtacaaattttctggtaagcgcattaagcgcggcctgtatcgcactaaatcaggaaaacttattaacgcagacgtgaatggggcattgaatattttaaaaaaaagcaaggctgttgatttgtctgtcttgtgcagttctggtgaggtagacaccccgcaacgtattcgcatcgcgtgataacctaggctgctgccaccgctgagcaataactagcataaccccttggggcctctaaacgggtcttgaggggttttttgctgaaacctcaggcatttgagaagcacacggtcacactgcttccggtagtcaataaaccggtaaaccagcaatagacataagcggctatttaacgaccctgccctgaaccgacgaccgggtcatcgtggccggatcttgcggcccctcggcttgaacgaattgttagacattatttgccgactaccttggtgatctcgcctttcacgtagtggacaaattcttccaactgatctgcgcgcgaggccaagcgatcttcttcttgtccaagataagcctgtctagcttcaagtatgacgggctgatactgggccggcaggcgctccattgcccagtcggcagcgacatccttcggcgcgattttgccggttactgcgctgtaccaaatgcgggacaacgtaagcactacatttcgctcatcgccagcccagtcgggcggcgagttccatagcgttaaggtttcatttagcgcctcaaatagatcctgttcaggaaccggatcaaagagttcctccgccgctggacctaccaaggcaacgctatgttctcttgcttttgtcagcaagatagccagatcaatgtcgatcgtggctggctcgaagatacctgcaagaatgtcattgcgctgccattctccaaattgcagttcgcgcttagctggataacgccacggaatgatgtcgtcgtgcacaacaatggtgacttctacagcgcggagaatctcgctctctccaggggaagccgaagtttccaaaaggtcgttgatcaaagctcgccgcgttgtttcatcaagccttacggtcaccgtaaccagcaaatcaatatcactgtgtggcttcaggccgccatccactgcggagccgtacaaatgtacggccagcaacgtcggttcgagatggcgctcgatgacgccaactacctctgatagttgagtcgatacttcggcgatcaccgcttccctcatactcttcctttttcaatattattgaagcatttatcagggttattgtctcatgagcggatacatatttgaatgtat

SEQ ID NO: 168 - DNA, 5004 bp, synthetic construct
  source 1..5004: mol_type = other DNA
gtatttagaaaaataaacaaatagctagctcactcggtcgctacgctccgggcgtgagactgcggcgggcgctgcggacacatacaaagttacccacagattccgtggataagcaggggactaacatgtgaggcaaaacagcagggccgcgccggtggcgtttttccataggctccgccctcctgccagagttcacataaacagacgcttttccggtgcatctgtgggagccgtgaggctcaaccatgaatctgacagtacgggcgaaacccgacaggacttaaagatccccaccgtttccggcgggtcgctccctcttgcgctctcctgttccgaccctgccgtttaccggatacctgttccgcctttctcccttacgggaagtgtggcgctttctcatagctcacacactggtatctcggctcggtgtaggtcgttcgctccaagctgggctgtaagcaagaactccccgttcagcccgactgctgcgccttatccggtaactgttcacttgagtccaacccggaaaagcacggtaaaacgccactggcagcagccattggtaactgggagttcgcagaggatttgtttagctaaacacgcggttgctcttgaagtgtgcgccaaagtccggctacactggaaggacagatttggttgctgtgctctgcgaaagccagttaccacggttaagcagttccccaactgacttaaccttcgatcaaaccacctccccaggtggttttttcgtttacagggcaaaagattacgcgcagaaaaaaaggatctcaagaagatcctttgatcttttctactgaaccgctctagatttcagtgcaatttatctcttcaaatgtagcacctgaagtcagccccatacgatataagttgtaattctcatgttagtcatgccccgcgcccaccggaaggagctgactgggttgaaggctctcaagggcatcggtcgagatcccggtgcctaatgagtgagctaacttacattaattgcgttgcgctcactgcccgctttccagtcgggaaacctgtcgtgccagctgcattaatgaatcggccaacgcgcggggagaggcggtttgcgtattgggcgccagggtggtttttcttttcaccagtgagacgggcaacagctgattgcccttcaccgcctggccctgagagagttgcagcaagcggtccacgctggtttgccccagcaggcgaaaatcctgtttgatggtggttaacggcgggatataacatgagctgtcttcggtatcgtcgtatcccactaccgagatgtccgcaccaacgcgcagcccggactcggtaatggcgcgcattgcgcccagcgccatctgatcgttggcaaccagcatcgcagtgggaacgatgccctcattcagcatttgcatggtttgttgaaaaccggacatggcactccagtcgccttcccgttccgctatcggctgaatttgattgcgagtgagatatttatgccagccagccagacgcagacgcgccgagacagaacttaatgggcccgctaacagcgcgatttgctggtgacccaatgcgaccagatgctccacgcccagtcgcgtaccgtcttcatgggagaaaataatactgttgatgggtgtctggtcagagacatcaagaaataacgccggaacattagtgcaggcagcttccacagcaatggcatcctggtcatccagcggatagttaatgatcagcccactgacgcgttgcgcgagaagattgtgcaccgccgctttacaggcttcgacgccgcttcgttctaccatcgacaccaccacgctggcacccagttgatcggcgcgagatttaatcgccgcgacaatttgcgacggcgcgtgcagggccagactggaggtggcaacgccaatcagcaacgactgtttgcccgccagttgttgtgccacgcggttgggaatgtaattcagctccgccatcgccgcttccactttttcccgcgttttcgcagaaacgtggctggcctggttcaccacgcgggaaacggtctgataagagacaccggcatactctgcgacatcgtataacgttactggtttcacattcaccaccctgaattgactctcttccgggcgctatcatgccataccgcgaaaggttttgcgccattcgatggtgtccgggatttacggctagctcagtcctaggtactatgctagcgtggagatatacctcgagttaagcgcggcttgtatcgaacaaagtctggcaaactaattaatgctgatgtcaatggcgcattaaacatcttaaagaaaagtaaagctgtagacctgagtgtcttatgctctagcggcgaagtggacacgcctcaaagaataaggattgcttgaagcagtcaaacttctttggaagcccccacttcaaattttcgctagaaaattaagtgggggtagttcacggacaagtggttcaccatgcgttgctttatggtatgatagctcgcggccgcaataactagcataaccccttggggcctctaaacgggtcttgaggggttttttgctgaagtcgactttgacagctagctcagtcctaggtataatgctagcgtggagatatacggtaccaaggagatataccatgggctatttttgcatcaagcagcagcttaatgggttgacgaaggaagagtacctgacactgcgtgagttgtgccatattgccaaaaacatgtacaacgttggcctttacaacgtacgtcagtactattttgagcataaggagttcttaaattacgaaaagaactatcacttggcgaagactaatgaaaactacaagttactgaactcgaacatggctcaacaaatcttgaaaaaagtaaatgaagccttcaaaagtttcttcggtcttatttcgcttgccaaacaaggtaaatacgaccataaagcaatctcgattcccaaatacttaaagaaagacggtttccattcgttaatcatcggccaaatccgcattgacggaaataagttcacgattccatactctcgcttattcaaaaagacacataagcccattacaatcactattccaccagtgttacttgataaaaagattaagcagatcgaaatcattccgaaacaccatgcacgtttcttcgagatccagtacaagtacgaaatgcctgaagatcagcgcgaacttaatgatcagaaggcgcttgcgattgacttggggcttaataacttggctacatgtgtaacctcagacggacgttctttcattattgacggccgtcgtcttaaatctatcaaccaatggttcaataaggaaaacgctcgcttgcagtctattaaagataaacagaagattaagggaaccacgcgtaaacaagcactgcttgcgatgaatcgtaataacaaggtgaacgactatatcaataagacctgccgctatatcattaactactgtatcgaaaatcaaattggcaagctggtaatcgggtacgccgaaacatggcagcgcaacatgaatttgggcaagaaaaccaaccaaaacttcgtcaatatccctcttggaaacattaaggagaagttagaatacctttgtgagttctatgggatcgagtttttgaagcaagaagagtcgtatacaagtcaagcgtcgttttttgatggagatgaaatccccgaatacaacgcggataatcccaaagagtacaaattttctggtaagcgcattaagcgcggcctgtatcgcactaaatcaggaaaacttattaacgcagacgtgaatggggcattgaatattttaaaaaaaagcaaggctgttgatttgtctgtcttgtgcagttctggtgaggtagacaccccgcaacgtattcgcatcgcgtgataacctaggctgctgccaccgctgagcaataactagcataaccccttggggcctctaaacgggtcttgaggggttttttgctgaaacctcaggcatttgagaagcacacggtcacactgcttccggtagtcaataaaccggtaaaccagcaatagacataagcggctatttaacgaccctgccctgaaccgacgaccgggtcatcgtggccggatcttgcggcccctcggcttgaacgaattgttagacattatttgccgactaccttggtgatctcgcctttcacgtagtggacaaattcttccaactgatctgcgcgcgaggccaagcgatcttcttcttgtccaagataagcctgtctagcttcaagtatgacgggctgatactgggccggcaggcgctccattgcccagtcggcagcgacatccttcggcgcgattttgccggttactgcgctgtaccaaatgcgggacaacgtaagcactacatttcgctcatcgccagcccagtcgggcggcgagttccatagcgttaaggtttcatttagcgcctcaaatagatcctgttcaggaaccggatcaaagagttcctccgccgctggacctaccaaggcaacgctatgttctcttgcttttgtcagcaagatagccagatcaatgtcgatcgtggctggctcgaagatacctgcaagaatgtcattgcgctgccattctccaaattgcagttcgcgcttagctggataacgccacggaatgatgtcgtcgtgcacaacaatggtgacttctacagcgcggagaatctcgctctctccaggggaagccgaagtttccaaaaggtcgttgatcaaagctcgccgcgttgtttcatcaagccttacggtcaccgtaaccagcaaatcaatatcactgtgtggcttcaggccgccatccactgcggagccgtacaaatgtacggccagcaacgtcggttcgagatggcgctcgatgacgccaactacctctgatagttgagtcgatacttcggcgatcaccgcttccctcatactcttcctttttcaatattattgaagcatttatcagggttattgtctcatgagcggatacatatttgaat

SEQ ID NO: 169 - DNA, 5000 bp, synthetic construct
  source 1..5000: mol_type = other DNA
agaaaaataaacaaatagctagctcactcggtcgctacgctccgggcgtgagactgcggcgggcgctgcggacacatacaaagttacccacagattccgtggataagcaggggactaacatgtgaggcaaaacagcagggccgcgccggtggcgtttttccataggctccgccctcctgccagagttcacataaacagacgcttttccggtgcatctgtgggagccgtgaggctcaaccatgaatctgacagtacgggcgaaacccgacaggacttaaagatccccaccgtttccggcgggtcgctccctcttgcgctctcctgttccgaccctgccgtttaccggatacctgttccgcctttctcccttacgggaagtgtggcgctttctcatagctcacacactggtatctcggctcggtgtaggtcgttcgctccaagctgggctgtaagcaagaactccccgttcagcccgactgctgcgccttatccggtaactgttcacttgagtccaacccggaaaagcacggtaaaacgccactggcagcagccattggtaactgggagttcgcagaggatttgtttagctaaacacgcggttgctcttgaagtgtgcgccaaagtccggctacactggaaggacagatttggttgctgtgctctgcgaaagccagttaccacggttaagcagttccccaactgacttaaccttcgatcaaaccacctccccaggtggttttttcgtttacagggcaaaagattacgcgcagaaaaaaaggatctcaagaagatcctttgatcttttctactgaaccgctctagatttcagtgcaatttatctcttcaaatgtagcacctgaagtcagccccatacgatataagttgtaattctcatgttagtcatgccccgcgcccaccggaaggagctgactgggttgaaggctctcaagggcatcggtcgagatcccggtgcctaatgagtgagctaacttacattaattgcgttgcgctcactgcccgctttccagtcgggaaacctgtcgtgccagctgcattaatgaatcggccaacgcgcggggagaggcggtttgcgtattgggcgccagggtggtttttcttttcaccagtgagacgggcaacagctgattgcccttcaccgcctggccctgagagagttgcagcaagcggtccacgctggtttgccccagcaggcgaaaatcctgtttgatggtggttaacggcgggatataacatgagctgtcttcggtatcgtcgtatcccactaccgagatgtccgcaccaacgcgcagcccggactcggtaatggcgcgcattgcgcccagcgccatctgatcgttggcaaccagcatcgcagtgggaacgatgccctcattcagcatttgcatggtttgttgaaaaccggacatggcactccagtcgccttcccgttccgctatcggctgaatttgattgcgagtgagatatttatgccagccagccagacgcagacgcgccgagacagaacttaatgggcccgctaacagcgcgatttgctggtgacccaatgcgaccagatgctccacgcccagtcgcgtaccgtcttcatgggagaaaataatactgttgatgggtgtctggtcagagacatcaagaaataacgccggaacattagtgcaggcagcttccacagcaatggcatcctggtcatccagcggatagttaatgatcagcccactgacgcgttgcgcgagaagattgtgcaccgccgctttacaggcttcgacgccgcttcgttctaccatcgacaccaccacgctggcacccagttgatcggcgcgagatttaatcgccgcgacaatttgcgacggcgcgtgcagggccagactggaggtggcaacgccaatcagcaacgactgtttgcccgccagttgttgtgccacgcggttgggaatgtaattcagctccgccatcgccgcttccactttttcccgcgttttcgcagaaacgtggctggcctggttcaccacgcgggaaacggtctgataagagacaccggcatactctgcgacatcgtataacgttactggtttcacattcaccaccctgaattgactctcttccgggcgctatcatgccataccgcgaaaggttttgcgccattcgatggtgtccgggattgacagctagctcagtcctaggtataatgctagcgtggagatatacctcgagttaagcgcggcttgtatcgaacaaagtctggcaaactaattaatgctgatgtcaatggcgcattaaacatcttaaagaaaagtaaagctgtagacctgagtgtcttatgctctagcggcgaagtggacacgcctcaaagaataaggattgcttgaagcagtcaaacttctttggaagcccccacttcaaattttcgctagaaaattaagtgggggtagttcacggacaagtggttcaccatgcgttgctttatggtatgatagctcgcggccgcaataactagcataaccccttggggcctctaaacgggtcttgaggggttttttgctgaagtcgacttttacactttatgcttccggctcgtatgttggtggagatatacggtaccaaggagatataccatgggctatttttgcatcaagcagcagcttaatgggttgacgaaggaagagtacctgacactgcgtgagttgtgccatattgccaaaaacatgtacaacgttggcctttacaacgtacgtcagtactattttgagcataaggagttcttaaattacgaaaagaactatcacttggcgaagactaatgaaaactacaagttactgaactcgaacatggctcaacaaatcttgaaaaaagtaaatgaagccttcaaaagtttcttcggtcttatttcgcttgccaaacaaggtaaatacgaccataaagcaatctcgattcccaaatacttaaagaaagacggtttccattcgttaatcatcggccaaatccgcattgacggaaataagttcacgattccatactctcgcttattcaaaaagacacataagcccattacaatcactattccaccagtgttacttgataaaaagattaagcagatcgaaatcattccgaaacaccatgcacgtttcttcgagatccagtacaagtacgaaatgcctgaagatcagcgcgaacttaatgatcagaaggcgcttgcgattgacttggggcttaataacttggctacatgtgtaacctcagacggacgttctttcattattgacggccgtcgtcttaaatctatcaaccaatggttcaataaggaaaacgctcgcttgcagtctattaaagataaacagaagattaagggaaccacgcgtaaacaagcactgcttgcgatgaatcgtaataacaaggtgaacgactatatcaataagacctgccgctatatcattaactactgtatcgaaaatcaaattggcaagctggtaatcgggtacgccgaaacatggcagcgcaacatgaatttgggcaagaaaaccaaccaaaacttcgtcaatatccctcttggaaacattaaggagaagttagaatacctttgtgagttctatgggatcgagtttttgaagcaagaagagtcgtatacaagtcaagcgtcgttttttgatggagatgaaatccccgaatacaacgcggataatcccaaagagtacaaattttctggtaagcgcattaagcgcggcctgtatcgcactaaatcaggaaaacttattaacgcagacgtgaatggggcattgaatattttaaaaaaaagcaaggctgttgatttgtctgtcttgtgcagttctggtgaggtagacaccccgcaacgtattcgcatcgcgtgataacctaggctgctgccaccgctgagcaataactagcataaccccttggggcctctaaacgggtcttgaggggttttttgctgaaacctcaggcatttgagaagcacacggtcacactgcttccggtagtcaataaaccggtaaaccagcaatagacataagcggctatttaacgaccctgccctgaaccgacgaccgggtcatcgtggccggatcttgcggcccctcggcttgaacgaattgttagacattatttgccgactaccttggtgatctcgcctttcacgtagtggacaaattcttccaactgatctgcgcgcgaggccaagcgatcttcttcttgtccaagataagcctgtctagcttcaagtatgacgggctgatactgggccggcaggcgctccattgcccagtcggcagcgacatccttcggcgcgattttgccggttactgcgctgtaccaaatgcgggacaacgtaagcactacatttcgctcatcgccagcccagtcgggcggcgagttccatagcgttaaggtttcatttagcgcctcaaatagatcctgttcaggaaccggatcaaagagttcctccgccgctggacctaccaaggcaacgctatgttctcttgcttttgtcagcaagatagccagatcaatgtcgatcgtggctggctcgaagatacctgcaagaatgtcattgcgctgccattctccaaattgcagttcgcgcttagctggataacgccacggaatgatgtcgtcgtgcacaacaatggtgacttctacagcgcggagaatctcgctctctccaggggaagccgaagtttccaaaaggtcgttgatcaaagctcgccgcgttgtttcatcaagccttacggtcaccgtaaccagcaaatcaatatcactgtgtggcttcaggccgccatccactgcggagccgtacaaatgtacggccagcaacgtcggttcgagatggcgctcgatgacgccaactacctctgatagttgagtcgatacttcggcgatcaccgcttccctcatactcttcctttttcaatattattgaagcatttatcagggttattgtctcatgagcggatacatatttgaatgtattt

SEQ ID NO: 170 - DNA, 5004 bp, synthetic construct
  source 1..5004: mol_type = other DNA
atatttgaatgtatttagaaaaataaacaaatagctagctcactcggtcgctacgctccgggcgtgagactgcggcgggcgctgcggacacatacaaagttacccacagattccgtggataagcaggggactaacatgtgaggcaaaacagcagggccgcgccggtggcgtttttccataggctccgccctcctgccagagttcacataaacagacgcttttccggtgcatctgtgggagccgtgaggctcaaccatgaatctgacagtacgggcgaaacccgacaggacttaaagatccccaccgtttccggcgggtcgctccctcttgcgctctcctgttccgaccctgccgtttaccggatacctgttccgcctttctcccttacgggaagtgtggcgctttctcatagctcacacactggtatctcggctcggtgtaggtcgttcgctccaagctgggctgtaagcaagaactccccgttcagcccgactgctgcgccttatccggtaactgttcacttgagtccaacccggaaaagcacggtaaaacgccactggcagcagccattggtaactgggagttcgcagaggatttgtttagctaaacacgcggttgctcttgaagtgtgcgccaaagtccggctacactggaaggacagatttggttgctgtgctctgcgaaagccagttaccacggttaagcagttccccaactgacttaaccttcgatcaaaccacctccccaggtggttttttcgtttacagggcaaaagattacgcgcagaaaaaaaggatctcaagaagatcctttgatcttttctactgaaccgctctagatttcagtgcaatttatctcttcaaatgtagcacctgaagtcagccccatacgatataagttgtaattctcatgttagtcatgccccgcgcccaccggaaggagctgactgggttgaaggctctcaagggcatcggtcgagatcccggtgcctaatgagtgagctaacttacattaattgcgttgcgctcactgcccgctttccagtcgggaaacctgtcgtgccagctgcattaatgaatcggccaacgcgcggggagaggcggtttgcgtattgggcgccagggtggtttttcttttcaccagtgagacgggcaacagctgattgcccttcaccgcctggccctgagagagttgcagcaagcggtccacgctggtttgccccagcaggcgaaaatcctgtttgatggtggttaacggcgggatataacatgagctgtcttcggtatcgtcgtatcccactaccgagatgtccgcaccaacgcgcagcccggactcggtaatggcgcgcattgcgcccagcgccatctgatcgttggcaaccagcatcgcagtgggaacgatgccctcattcagcatttgcatggtttgttgaaaaccggacatggcactccagtcgccttcccgttccgctatcggctgaatttgattgcgagtgagatatttatgccagccagccagacgcagacgcgccgagacagaacttaatgggcccgctaacagcgcgatttgctggtgacccaatgcgaccagatgctccacgcccagtcgcgtaccgtcttcatgggagaaaataatactgttgatgggtgtctggtcagagacatcaagaaataacgccggaacattagtgcaggcagcttccacagcaatggcatcctggtcatccagcggatagttaatgatcagcccactgacgcgttgcgcgagaagattgtgcaccgccgctttacaggcttcgacgccgcttcgttctaccatcgacaccaccacgctggcacccagttgatcggcgcgagatttaatcgccgcgacaatttgcgacggcgcgtgcagggccagactggaggtggcaacgccaatcagcaacgactgtttgcccgccagttgttgtgccacgcggttgggaatgtaattcagctccgccatcgccgcttccactttttcccgcgttttcgcagaaacgtggctggcctggttcaccacgcgggaaacggtctgataagagacaccggcatactctgcgacatcgtataacgttactggtttcacattcaccaccctgaattgactctcttccgggcgctatcatgccataccgcgaaaggttttgcgccattcgatggtgtccgggattgacagctagctcagtcctaggtataatgctagcgtggagatatacctcgagttaagcgcggcttgtatcgaacaaagtctggcaaactaattaatgctgatgtcaatggcgcattaaacatcttaaagaaaagtaaagctgtagacctgagtgtcttatgctctagcggcgaagtggacacgcctcaaagaataaggattgcttgaagcagtcaaacttctttggaagcccccacttcaaattttcgctagaaaattaagtgggggtagttcacggacaagtggttcaccatgcgttgctttatggtatgatagctcgcggccgcaataactagcataaccccttggggcctctaaacgggtcttgaggggttttttgctgaagtcgactttgacagctagctcagtcctaggtataatgctagcgtggagatatacggtaccaaggagatataccatgggctatttttgcatcaagcagcagcttaatgggttgacgaaggaagagtacctgacactgcgtgagttgtgccatattgccaaaaacatgtacaacgttggcctttacaacgtacgtcagtactattttgagcataaggagttcttaaattacgaaaagaactatcacttggcgaagactaatgaaaactacaagttactgaactcgaacatggctcaacaaatcttgaaaaaagtaaatgaagccttcaaaagtttcttcggtcttatttcgcttgccaaacaaggtaaatacgaccataaagcaatctcgattcccaaatacttaaagaaagacggtttccattcgttaatcatcggccaaatccgcattgacggaaataagttcacgattccatactctcgcttattcaaaaagacacataagcccattacaatcactattccaccagtgttacttgataaaaagattaagcagatcgaaatcattccgaaacaccatgcacgtttcttcgagatccagtacaagtacgaaatgcctgaagatcagcgcgaacttaatgatcagaaggcgcttgcgattgacttggggcttaataacttggctacatgtgtaacctcagacggacgttctttcattattgacggccgtcgtcttaaatctatcaaccaatggttcaataaggaaaacgctcgcttgcagtctattaaagataaacagaagattaagggaaccacgcgtaaacaagcactgcttgcgatgaatcgtaataacaaggtgaacgactatatcaataagacctgccgctatatcattaactactgtatcgaaaatcaaattggcaagctggtaatcgggtacgccgaaacatggcagcgcaacatgaatttgggcaagaaaaccaaccaaaacttcgtcaatatccctcttggaaacattaaggagaagttagaatacctttgtgagttctatgggatcgagtttttgaagcaagaagagtcgtatacaagtcaagcgtcgttttttgatggagatgaaatccccgaatacaacgcggataatcccaaagagtacaaattttctggtaagcgcattaagcgcggcctgtatcgcactaaatcaggaaaacttattaacgcagacgtgaatggggcattgaatattttaaaaaaaagcaaggctgttgatttgtctgtcttgtgcagttctggtgaggtagacaccccgcaacgtattcgcatcgcgtgataacctaggctgctgccaccgctgagcaataactagcataaccccttggggcctctaaacgggtcttgaggggttttttgctgaaacctcaggcatttgagaagcacacggtcacactgcttccggtagtcaataaaccggtaaaccagcaatagacataagcggctatttaacgaccctgccctgaaccgacgaccgggtcatcgtggccggatcttgcggcccctcggcttgaacgaattgttagacattatttgccgactaccttggtgatctcgcctttcacgtagtggacaaattcttccaactgatctgcgcgcgaggccaagcgatcttcttcttgtccaagataagcctgtctagcttcaagtatgacgggctgatactgggccggcaggcgctccattgcccagtcggcagcgacatccttcggcgcgattttgccggttactgcgctgtaccaaatgcgggacaacgtaagcactacatttcgctcatcgccagcccagtcgggcggcgagttccatagcgttaaggtttcatttagcgcctcaaatagatcctgttcaggaaccggatcaaagagttcctccgccgctggacctaccaaggcaacgctatgttctcttgcttttgtcagcaagatagccagatcaatgtcgatcgtggctggctcgaagatacctgcaagaatgtcattgcgctgccattctccaaattgcagttcgcgcttagctggataacgccacggaatgatgtcgtcgtgcacaacaatggtgacttctacagcgcggagaatctcgctctctccaggggaagccgaagtttccaaaaggtcgttgatcaaagctcgccgcgttgtttcatcaagccttacggtcaccgtaaccagcaaatcaatatcactgtgtggcttcaggccgccatccactgcggagccgtacaaatgtacggccagcaacgtcggttcgagatggcgctcgatgacgccaactacctctgatagttgagtcgatacttcggcgatcaccgcttccctcatactcttcctttttcaatattattgaagcatttatcagggttattgtctcatgagcggatac

SEQ ID NO: 171 - DNA, 1946 bp, synthetic construct
  source 1..1946: mol_type = other DNA
attcttctaatacctggaatgctgttttcccggggatcgcagtggtgagtaaccatgcatcatcaggagtacggataaaatgcttgatggtcggaagaggcataaattccgtcagccagtttagtctgaccatctcatctgtaacatcattggcaacgctacctttgccatgtttcagaaacaactctggcgcatcgggcttcccatacaatcgatagattgtcgcacctgattgcccgacattatcgcgagcccatttatacccatataaatcagcatccatgttggaatttaatcgcggcctagagcaagacgtttcccgttgaatatggctcatactcttcctttttcaatattattgaagcatttatcagggttattgtctcatgagcggatacatatttgaatgtatttagaaaaataaacaaataggcatgctagcgcagaaacgtcctagaagatgccaggaggatacttagcagagagacaataaggccggagcgaagccgtttttccataggctccgcccccctgacgaacatcacgaaatctgacgctcaaatcagtggtggcgaaacccgacaggactataaagataccaggcgtttccccctgatggctccctcttgcgctctcctgttcccgtcctgcggcgtccgtgttgtggtggaggctttacccaaatcaccacgtcccgttccgtgtagacagttcgctccaagctgggctgtgtgcaagaaccccccgttcagcccgactgctgcgccttatccggtaactatcatcttgagtccaacccggaaagacacgacaaaacgccactggcagcagccattggtaactgagaattagtggatttagatatcgagagtcttgaagtggtggcctaacagaggctacactgaaaggacagtatttggtatctgcgctccactaaagccagttaccaggttaagcagttccccaactgacttaaccttcgatcaaaccgcctccccaggcggttttttcgtttacagagcaggagattacgacgatcgtaaaaggatctcaagaagatcctttacggattcccgacaccatcactctagatttcagtgcaatttatctcttcaaatgtagcacctgaagtcagccccatacgatataagttgtaattctcatgttagtcatgccccgcgcccaccggaaggagctgactgggttgaaggctctcaagggcatcggtcgagatcccggtgcctaatgagtgagctaacgttactaaatgttaccaataagttaaaatttgttaaccggtaaaccagcaatagacataagcggctatttaacgaccctgccctgaaccgacgacaagctgacgaccgggtctccgcaagtggcacttttcggggaaatgtgcgcggaacccctatttgtttatttttctaaatacattcaaatatgtatccgctcatgaattaattcttagaaaaactcatcgagcatcaaatgaaactgcaatttattcatatcaggattatcaataccatatttttgaaaaagccgtttctgtaatgaaggagaaaactcaccgaggcagttccataggatggcaagatcctggtatcggtctgcgattccgactcgtccaacatcaatacaacctattaatttcccctcgtcaaaaataaggttatcaagtgagaaatcaccatgagtgacgactgaatccggtgagaatggcaaaagtttatgcatttctttccagacttgttcaacaggccagccattacgctcgtcatcaaaatcactcgcatcaaccaaaccgttattcattcgtgattgcgcctgagcgagacgaaatacgcggtcgctgttaaaaggacaattacaaacaggaatcgaatgcaaccggcgcaggaacactgccagcgcatcaacaatattttcacctgaatcaggat

SEQ ID NO: 172 - DNA, 1958 bp, synthetic construct
  source 1..1958: mol_type = other DNA
cgcacctgattgcccgacattatcgcgagcccatttatacccatataaatcagcatccatgttggaatttaatcgcggcctagagcaagacgtttcccgttgaatatggctcatactcttcctttttcaatattattgaagcatttatcagggttattgtctcatgagcggatacatatttgaatgtatttagaaaaataaacaaataggcatgctagcgcagaaacgtcctagaagatgccaggaggatacttagcagagagacaataaggccggagcgaagccgtttttccataggctccgcccccctgacgaacatcacgaaatctgacgctcaaatcagtggtggcgaaacccgacaggactataaagataccaggcgtttccccctgatggctccctcttgcgctctcctgttcccgtcctgcggcgtccgtgttgtggtggaggctttacccaaatcaccacgtcccgttccgtgtagacagttcgctccaagctgggctgtgtgcaagaaccccccgttcagcccgactgctgcgccttatccggtaactatcatcttgagtccaacccggaaagacacgacaaaacgccactggcagcagccattggtaactgagaattagtggatttagatatcgagagtcttgaagtggtggcctaacagaggctacactgaaaggacagtatttggtatctgcgctccactaaagccagttaccaggttaagcagttccccaactgacttaaccttcgatcaaaccgcctccccaggcggttttttcgtttacagagcaggagattacgacgatcgtaaaaggatctcaagaagatcctttacggattcccgacaccatcactctagatttcagtgcaatttatctcttcaaatgtagcacctgaagtcagccccatacgatataagttgtaattctcatgttagtcatgccccgcgcccaccggaaggagctgactgggttgaaggctctcaagggcatcggtcgagatcccggtgcctaatgagtgagctaacttgatgagtcccttggcgcccatgaaggcgaagaggataaaagccaaaccggtaaaccagcaatagacataagcggctatttaacgaccctgccctgaaccgacgacaagctgacgaccgggtctccgcaagtggcacttttcggggaaatgtgcgcggaacccctatttgtttatttttctaaatacattcaaatatgtatccgctcatgaattaattcttagaaaaactcatcgagcatcaaatgaaactgcaatttattcatatcaggattatcaataccatatttttgaaaaagccgtttctgtaatgaaggagaaaactcaccgaggcagttccataggatggcaagatcctggtatcggtctgcgattccgactcgtccaacatcaatacaacctattaatttcccctcgtcaaaaataaggttatcaagtgagaaatcaccatgagtgacgactgaatccggtgagaatggcaaaagtttatgcatttctttccagacttgttcaacaggccagccattacgctcgtcatcaaaatcactcgcatcaaccaaaccgttattcattcgtgattgcgcctgagcgagacgaaatacgcggtcgctgttaaaaggacaattacaaacaggaatcgaatgcaaccggcgcaggaacactgccagcgcatcaacaatattttcacctgaatcaggatattcttctaatacctggaatgctgttttcccggggatcgcagtggtgagtaaccatgcatcatcaggagtacggataaaatgcttgatggtcggaagaggcataaattccgtcagccagtttagtctgaccatctcatctgtaacatcattggcaacgctacctttgccatgtttcagaaacaactctggcgcatcgggcttcccatacaatcgatagattgt

SEQ ID NO: 173 - DNA, 4968 bp, synthetic construct
  source 1..4968: mol_type = other DNA
caaaacagcagggccgcgccggtggcgtttttccataggctccgccctcctgccagagttcacataaacagacgcttttccggtgcatctgtgggagccgtgaggctcaaccatgaatctgacagtacgggcgaaacccgacaggacttaaagatccccaccgtttccggcgggtcgctccctcttgcgctctcctgttccgaccctgccgtttaccggatacctgttccgcctttctcccttacgggaagtgtggcgctttctcatagctcacacactggtatctcggctcggtgtaggtcgttcgctccaagctgggctgtaagcaagaactccccgttcagcccgactgctgcgccttatccggtaactgttcacttgagtccaacccggaaaagcacggtaaaacgccactggcagcagccattggtaactgggagttcgcagaggatttgtttagctaaacacgcggttgctcttgaagtgtgcgccaaagtccggctacactggaaggacagatttggttgctgtgctctgcgaaagccagttaccacggttaagcagttccccaactgacttaaccttcgatcaaaccacctccccaggtggttttttcgtttacagggcaaaagattacgcgcagaaaaaaaggatctcaagaagatcctttgatcttttctactgaaccgctctagatttcagtgcaatttatctcttcaaatgtagcacctgaagtcagccccatacgatataagttgtaattctcatgttagtcatgccccgcgcccaccggaaggagctgactgggttgaaggctctcaagggcatcggtcgagatcccggtgcctaatgagtgagctaacttacattaattgcgttgcgctcactgcccgctttccagtcgggaaacctgtcgtgccagctgcattaatgaatcggccaacgcgcggggagaggcggtttgcgtattgggcgccagggtggtttttcttttcaccagtgagacgggcaacagctgattgcccttcaccgcctggccctgagagagttgcagcaagcggtccacgctggtttgccccagcaggcgaaaatcctgtttgatggtggttaacggcgggatataacatgagctgtcttcggtatcgtcgtatcccactaccgagatgtccgcaccaacgcgcagcccggactcggtaatggcgcgcattgcgcccagcgccatctgatcgttggcaaccagcatcgcagtgggaacgatgccctcattcagcatttgcatggtttgttgaaaaccggacatggcactccagtcgccttcccgttccgctatcggctgaatttgattgcgagtgagatatttatgccagccagccagacgcagacgcgccgagacagaacttaatgggcccgctaacagcgcgatttgctggtgacccaatgcgaccagatgctccacgcccagtcgcgtaccgtcttcatgggagaaaataatactgttgatgggtgtctggtcagagacatcaagaaataacgccggaacattagtgcaggcagcttccacagcaatggcatcctggtcatccagcggatagttaatgatcagcccactgacgcgttgcgcgagaagattgtgcaccgccgctttacaggcttcgacgccgcttcgttctaccatcgacaccaccacgctggcacccagttgatcggcgcgagatttaatcgccgcgacaatttgcgacggcgcgtgcagggccagactggaggtggcaacgccaatcagcaacgactgtttgcccgccagttgttgtgccacgcggttgggaatgtaattcagctccgccatcgccgcttccactttttcccgcgttttcgcagaaacgtggctggcctggttcaccacgcgggaaacggtctgataagagacaccggcatactctgcgacatcgtataacgttactggtttcacattcaccaccctgaattgactctcttccgggcgctatcatgccataccgcgaaaggttttgcgccattcgatggtgtccgggagaaattaatacgactcactataggcctcgaggattcaagaatcccgaagtgaagaatcttgccgtccgtacatggacttgcccgaactgtggggaaacccatgaccgagacgagaacgctgcgctgaacattcggcgtgaagcgttggtggctgcgggaatctcagacaccttaaacgctcatggaggctatgtcagacctgcttcggcgggcaatggtctgcgaagtgagaatcacgcgactttagtcgtgtgaggttcaagagtcccttggcgcccatgaaggcgaagaggataaaagccctcgcggccgcaataactagcataaccccttggggcctctaaacgggtcttgaggggttttttgctgaagtcgacttaatacgactcactataggggaattgtgagcggataacaattcccaggtaccaaggagatataccatgggcataaggaataaggctttcgtggtcaggctgtacccaaatgcggctcagactgaactgattaaccgcacgctgggtagcgcaaggttcgtctacaaccacttccttgcccgtcgcattgcggcctacaaggaaagcgggaagggactgacctacgggcaaacgagtagcgaactgacccttctgaagcaggctgaagaaacctcctggctctcggaagtagataagtttgctttgcagaactcgctgaaaaaccttgaaaccgcgtacaagaacttctttcggactgtgaagcagtccggtaaaaaggtaggattcccacgtttcagaaagaagcgcacgggagagtcctaccggactcaattcaccaacaacaacatccaaattggggaaggtaggctcaaacttcctaagctgggatgggtgaaaaccaagggccagcaggatattcaagggaagattctgaatgtcactgtgcgccgtattcacgaaggccattacgaagcgtccgttctctgtgaagtcgagattccctacctgcctgcggctcccaagtttgcagcgggtgtggatgtcggcatcaaggattttgccatcgtgaccgatggcgtgaggtttaagcatgaacagaatccgaaatattaccgctccaccctgaaaagacttcgtaaagctcagcaaaccctgtccagacggaagaagggcagcgcacgttacgggaaagcgaaaaccaagctggctcggattcacaagcgcattgtcaataagcgtcaggatttccttcacaagctcaccacctccctggtgcgtgagtacgaaatcatcggaaccgaacaccttaaacccgacaacatgcggaaaaatcgccgccttgcactgagcatcagtgatgcgggctggggtgagttcatccggcagttggaatacaaggcagcgtggtacgggcgactggtatctaaagtcagcccctactttccatctagccagttgtgtcatgactgcggattcaagaatcccgaagtgaagaatcttgccgtccgtacatggacttgcccgaactgtggggaaacccatgaccgagacgagaacgctgcgctgaacattcggcgtgaagcgttggtggctgcgggaatctcagacaccttaaacgctcatggaggctatgtcagacctgcttcggcgggcaatggtctgcgaagtgagaatcacgcgactttagtcgtgtgataacctaggctgctgccaccgctgagcaataactagcataaccccttggggcctctaaacgggtcttgaggggttttttgctgaaacctcaggcatttgagaagcacacggtcacactgcttccggtagtcaataaaccggtaaaccagcaatagacataagcggctatttaacgaccctgccctgaaccgacgaccgggtcatcgtggccggatcttgcggcccctcggcttgaacgaattgttagacattatttgccgactaccttggtgatctcgcctttcacgtagtggacaaattcttccaactgatctgcgcgcgaggccaagcgatcttcttcttgtccaagataagcctgtctagcttcaagtatgacgggctgatactgggccggcaggcgctccattgcccagtcggcagcgacatccttcggcgcgattttgccggttactgcgctgtaccaaatgcgggacaacgtaagcactacatttcgctcatcgccagcccagtcgggcggcgagttccatagcgttaaggtttcatttagcgcctcaaatagatcctgttcaggaaccggatcaaagagttcctccgccgctggacctaccaaggcaacgctatgttctcttgcttttgtcagcaagatagccagatcaatgtcgatcgtggctggctcgaagatacctgcaagaatgtcattgcgctgccattctccaaattgcagttcgcgcttagctggataacgccacggaatgatgtcgtcgtgcacaacaatggtgacttctacagcgcggagaatctcgctctctccaggggaagccgaagtttccaaaaggtcgttgatcaaagctcgccgcgttgtttcatcaagccttacggtcaccgtaaccagcaaatcaatatcactgtgtggcttcaggccgccatccactgcggagccgtacaaatgtacggccagcaacgtcggttcgagatggcgctcgatgacgccaactacctctgatagttgagtcgatacttcggcgatcaccgcttccctcatactcttcctttttcaatattattgaagcatttatcagggttattgtctcatgagcggatacatatttgaatgtatttagaaaaataaacaaatagctagctcactcggtcgctacgctccgggcgtgagactgcggcgggcgctgcggacacatacaaagttacccacagattccgtggataagcaggggactaacatgtgagg

SEQ ID NO: 174 - DNA, 5400 bp, synthetic construct
  source 1..5400: mol_type = other DNA
ttttctactgaaccgctctagatttcagtgcaatttatctcttcaaatgtagcacctgaagtcagccccatacgatataagttgtaattctcatgttagtcatgccccgcgcccaccggaaggagctgactgggttgaaggctctcaagggcatcggtcgagatcccggtgcctaatgagtgagctaacttacattaattgcgttgcgctcactgcccgctttccagtcgggaaacctgtcgtgccagctgcattaatgaatcggccaacgcgcggggagaggcggtttgcgtattgggcgccagggtggtttttcttttcaccagtgagacgggcaacagctgattgcccttcaccgcctggccctgagagagttgcagcaagcggtccacgctggtttgccccagcaggcgaaaatcctgtttgatggtggttaacggcgggatataacatgagctgtcttcggtatcgtcgtatcccactaccgagatgtccgcaccaacgcgcagcccggactcggtaatggcgcgcattgcgcccagcgccatctgatcgttggcaaccagcatcgcagtgggaacgatgccctcattcagcatttgcatggtttgttgaaaaccggacatggcactccagtcgccttcccgttccgctatcggctgaatttgattgcgagtgagatatttatgccagccagccagacgcagacgcgccgagacagaacttaatgggcccgctaacagcgcgatttgctggtgacccaatgcgaccagatgctccacgcccagtcgcgtaccgtcttcatgggagaaaataatactgttgatgggtgtctggtcagagacatcaagaaataacgccggaacattagtgcaggcagcttccacagcaatggcatcctggtcatccagcggatagttaatgatcagcccactgacgcgttgcgcgagaagattgtgcaccgccgctttacaggcttcgacgccgcttcgttctaccatcgacaccaccacgctggcacccagttgatcggcgcgagatttaatcgccgcgacaatttgcgacggcgcgtgcagggccagactggaggtggcaacgccaatcagcaacgactgtttgcccgccagttgttgtgccacgcggttgggaatgtaattcagctccgccatcgccgcttccactttttcccgcgttttcgcagaaacgtggctggcctggttcaccacgcgggaaacggtctgataagagacaccggcatactctgcgacatcgtataacgttactggtttcacattcaccaccctgaattgactctcttccgggcgctatcatgccataccgcgaaaggttttgcgccattcgatggtgtccgggatctcgacgctctcccttatgcgactcctgcattaggaaattaatacgactcactataggcccaactgcaccaaaaaatcaaacacttaagaaccgatttcttttataaattggctttgaagttaagcagaaaataccaaagcattttcattgaagacttgaacatgaaagctatgcaaaaactttggggtaggaaagtgagcgatatagcttttagcgagtttgtgaaaatccttgaaaacaaggctcatgtcgttaagattgatagattttatcctagctctaagacttgttctaattgcttatctgttgatgaaaactttaataaagacattaaaaaattaggcaaaacagataaagaaagagaataccactgcaaatattgtggattggaactagacagggatttaaatgcgtctatcaatattcatagggttggggcatcaatccttggggtagaatttgtaagacctacctagtaggctgagtttgcttgatcccaatttttctcatgctttagctagaatcccctagctttagctatggggagtatgtcaataaatgttaccaataagttaaaatttgttaaaataatcataataattaaagattttaaccactgttgtagaaaaataacaagagagtttgtaaaaactctgcgtgctagaggcatcaaataaaacgaaaggctcagtcgaaagactgggcctttcgttttatctgttgtttgtcggtgaacgctctcctgagtaggacaaatggatccgaattcgagctcggcgcgcctgcaggtcgacaagcttgcggccgcataatgcttaagtcgaacagaaagtaatcgtattgtacacggccgcataatcgaaattaatacgactcactataggggaattgtgagcggataacaattccccatcttagtatattagttaagtataagaaggagatatacccatgggcttaattacatataagcagaagctgtataaaaacgataaaaatcgccgcattgatactttactgcgccgttatggggtattttacaaccactgtatcgctttacacaaacgctattaccgcctgttcaagaagtatttgaagctgaacgaccttcaaaagcatacaaccaagcttaaaaaaacacaccgttacgcattcctgaaaacgttaggcagccagacgttacaagatttgaccgaacgtattgacaaggcattcaaaaagttttttaaaaaacaggctaaattaccacgctttaagaaagtagctaattataagagttttacctttaagtcccaagtagataagaagacgggccttaacaagggggtagggttcgagattaaagataatgtggtttcattctcgggctactcgtacaaattcatcaagacgtacgctttaatcggaaaagtgaagacgctgacaatcaaacgcgacaacatgggcgactatttcttatgccttgtatgtgaactggaaaataaccccaataaacagacagcctgcgacaagtctgttggctttgattttggccttcgtactttccttactggttctgataatacgaagatcgaaagccctttgttcttcagccaatacttgccactgatcaaacgtttatcgaagaatttgtcaaaaaaggtaaaaggatcgaacaattttaaaaaagccaagaagaagcttgcacaactgcatcaaaaaatcaagcacttacgtactgatttcttctataaattggcgttgaaattgtcgcgtaagtatcaatcgatcttcattgaagatttaaatatgaaggcaatgcaaaagctgtggggccgtaaggtgtcagacatcgcgttctcagagttcgtgaaaattttggagaataaggcgcacgttgtgaaaattgatcgcttctacccctcgagcaaaacctgtagcaattgtctgtcagtggacgaaaactttaataaagacattaagaaactggggaagactgacaaagaacgcgaatatcactgcaaatattgtggcctggagttagaccgtgacttaaacgctagcattaacattcaccgtgtgggggcatcgattttaggagtggagtttgtccgcccgacctgataacctaggctgctgccaccgctgagcaataactagcataaccccttggggcctctaaacgggtcttgaggggttttttgctgaaacctcaggcatttgagaagcacacggtcacactgcttccggtagtcaataaaccggtaaaccagcaatagacataagcggctatttaacgaccctgccctgaaccgacgaccgggtcatcgtggccggatcttgcggcccctcggcttgaacgaattgttagacattatttgccgactaccttggtgatctcgcctttcacgtagtggacaaattcttccaactgatctgcgcgcgaggccaagcgatcttcttcttgtccaagataagcctgtctagcttcaagtatgacgggctgatactgggccggcaggcgctccattgcccagtcggcagcgacatccttcggcgcgattttgccggttactgcgctgtaccaaatgcgggacaacgtaagcactacatttcgctcatcgccagcccagtcgggcggcgagttccatagcgttaaggtttcatttagcgcctcaaatagatcctgttcaggaaccggatcaaagagttcctccgccgctggacctaccaaggcaacgctatgttctcttgcttttgtcagcaagatagccagatcaatgtcgatcgtggctggctcgaagatacctgcaagaatgtcattgcgctgccattctccaaattgcagttcgcgcttagctggataacgccacggaatgatgtcgtcgtgcacaacaatggtgacttctacagcgcggagaatctcgctctctccaggggaagccgaagtttccaaaaggtcgttgatcaaagctcgccgcgttgtttcatcaagccttacggtcaccgtaaccagcaaatcaatatcactgtgtggcttcaggccgccatccactgcggagccgtacaaatgtacggccagcaacgtcggttcgagatggcgctcgatgacgccaactacctctgatagttgagtcgatacttcggcgatcaccgcttccctcatactcttcctttttcaatattattgaagcatttatcagggttattgtctcatgagcggatacatatttgaatgtatttagaaaaataaacaaatagctagctcactcggtcgctacgctccgggcgtgagactgcggcgggcgctgcggacacatacaaagttacccacagattccgtggataagcaggggactaacatgtgaggcaaaacagcagggccgcgccggtggcgtttttccataggctccgccctcctgccagagttcacataaacagacgcttttccggtgcatctgtgggagccgtgaggctcaaccatgaatctgacagtacgggcgaaacccgacaggacttaaagatccccaccgtttccggcgggtcgctccctcttgcgctctcctgttccgaccctgccgtttaccggatacctgttccgcctttctcccttacgggaagtgtggcgctttctcatagctcacacactggtatctcggctcggtgtaggtcgttcgctccaagctgggctgtaagcaagaactccccgttcagcccgactgctgcgccttatccggtaactgttcacttgagtccaacccggaaaagcacggtaaaacgccactggcagcagccattggtaactgggagttcgcagaggatttgtttagctaaacacgcggttgctcttgaagtgtgcgccaaagtccggctacactggaaggacagatttggttgctgtgctctgcgaaagccagttaccacggttaagcagttccccaactgacttaaccttcgatcaaaccacctccccaggtggttttttcgtttacagggcaaaagattacgcgcagaaaaaaaggatctcaagaagatcctttgatc

SEQ ID NO: 175 - DNA, 5004 bp, synthetic construct
  source 1..5004: mol_type = other DNA
caccgtaaccagcaaatcaatatcactgtgtggcttcaggccgccatccactgcggagccgtacaaatgtacggccagcaacgtcggttcgagatggcgctcgatgacgccaactacctctgatagttgagtcgatacttcggcgatcaccgcttccctcatactcttcctttttcaatattattgaagcatttatcagggttattgtctcatgagcggatacatatttgaatgtatttagaaaaataaacaaatagctagctcactcggtcgctacgctccgggcgtgagactgcggcgggcgctgcggacacatacaaagttacccacagattccgtggataagcaggggactaacatgtgaggcaaaacagcagggccgcgccggtggcgtttttccataggctccgccctcctgccagagttcacataaacagacgcttttccggtgcatctgtgggagccgtgaggctcaaccatgaatctgacagtacgggcgaaacccgacaggacttaaagatccccaccgtttccggcgggtcgctccctcttgcgctctcctgttccgaccctgccgtttaccggatacctgttccgcctttctcccttacgggaagtgtggcgctttctcatagctcacacactggtatctcggctcggtgtaggtcgttcgctccaagctgggctgtaagcaagaactccccgttcagcccgactgctgcgccttatccggtaactgttcacttgagtccaacccggaaaagcacggtaaaacgccactggcagcagccattggtaactgggagttcgcagaggatttgtttagctaaacacgcggttgctcttgaagtgtgcgccaaagtccggctacactggaaggacagatttggttgctgtgctctgcgaaagccagttaccacggttaagcagttccccaactgacttaaccttcgatcaaaccacctccccaggtggttttttcgtttacagggcaaaagattacgcgcagaaaaaaaggatctcaagaagatcctttgatcttttctactgaaccgctctagatttcagtgcaatttatctcttcaaatgtagcacctgaagtcagccccatacgatataagttgtaattctcatgttagtcatgccccgcgcccaccggaaggagctgactgggttgaaggctctcaagggcatcggtcgagatcccggtgcctaatgagtgagctaacttacattaattgcgttgcgctcactgcccgctttccagtcgggaaacctgtcgtgccagctgcattaatgaatcggccaacgcgcggggagaggcggtttgcgtattgggcgccagggtggtttttcttttcaccagtgagacgggcaacagctgattgcccttcaccgcctggccctgagagagttgcagcaagcggtccacgctggtttgccccagcaggcgaaaatcctgtttgatggtggttaacggcgggatataacatgagctgtcttcggtatcgtcgtatcccactaccgagatgtccgcaccaacgcgcagcccggactcggtaatggcgcgcattgcgcccagcgccatctgatcgttggcaaccagcatcgcagtgggaacgatgccctcattcagcatttgcatggtttgttgaaaaccggacatggcactccagtcgccttcccgttccgctatcggctgaatttgattgcgagtgagatatttatgccagccagccagacgcagacgcgccgagacagaacttaatgggcccgctaacagcgcgatttgctggtgacccaatgcgaccagatgctccacgcccagtcgcgtaccgtcttcatgggagaaaataatactgttgatgggtgtctggtcagagacatcaagaaataacgccggaacattagtgcaggcagcttccacagcaatggcatcctggtcatccagcggatagttaatgatcagcccactgacgcgttgcgcgagaagattgtgcaccgccgctttacaggcttcgacgccgcttcgttctaccatcgacaccaccacgctggcacccagttgatcggcgcgagatttaatcgccgcgacaatttgcgacggcgcgtgcagggccagactggaggtggcaacgccaatcagcaacgactgtttgcccgccagttgttgtgccacgcggttgggaatgtaattcagctccgccatcgccgcttccactttttcccgcgttttcgcagaaacgtggctggcctggttcaccacgcgggaaacggtctgataagagacaccggcatactctgcgacatcgtataacgttactggtttcacattcaccaccctgaattgactctcttccgggcgctatcatgccataccgcgaaaggttttgcgccattcgatggtgtccgggattgacagctagctcagtcctaggtataatgctagcgtggagatatacctcgagttaagcgcggcttgtatcgaacaaagtctggcaaactaattaatgctgatgtcaatggcgcattaaacatcttaaagaaaagtaaagctgtagacctgagtgtcttatgctctagcggcgaagtggacacgcctcaaagaataaggattgcttgaagcagtcaaacttctttggaagcccccacttcaaattttcgctagaaaattaagtgggggtagttcacggcagggtgaaacgcaggtcgccagcggcaccgcgcctttctcgcggccgcaataactagcataaccccttggggcctctaaacgggtcttgaggggttttttgctgaagtcgacttttacggctagctcagtcctaggtactatgctagcgtggagatatacggtaccaaggagatataccatgggctatttttgcatcaagcagcagcttaatgggttgacgaaggaagagtacctgacactgcgtgagttgtgccatattgccaaaaacatgtacaacgttggcctttacaacgtacgtcagtactattttgagcataaggagttcttaaattacgaaaagaactatcacttggcgaagactaatgaaaactacaagttactgaactcgaacatggctcaacaaatcttgaaaaaagtaaatgaagccttcaaaagtttcttcggtcttatttcgcttgccaaacaaggtaaatacgaccataaagcaatctcgattcccaaatacttaaagaaagacggtttccattcgttaatcatcggccaaatccgcattgacggaaataagttcacgattccatactctcgcttattcaaaaagacacataagcccattacaatcactattccaccagtgttacttgataaaaagattaagcagatcgaaatcattccgaaacaccatgcacgtttcttcgagatccagtacaagtacgaaatgcctgaagatcagcgcgaacttaatgatcagaaggcgcttgcgattgacttggggcttaataacttggctacatgtgtaacctcagacggacgttctttcattattgacggccgtcgtcttaaatctatcaaccaatggttcaataaggaaaacgctcgcttgcagtctattaaagataaacagaagattaagggaaccacgcgtaaacaagcactgcttgcgatgaatcgtaataacaaggtgaacgactatatcaataagacctgccgctatatcattaactactgtatcgaaaatcaaattggcaagctggtaatcgggtacgccgaaacatggcagcgcaacatgaatttgggcaagaaaaccaaccaaaacttcgtcaatatccctcttggaaacattaaggagaagttagaatacctttgtgagttctatgggatcgagtttttgaagcaagaagagtcgtatacaagtcaagcgtcgttttttgatggagatgaaatccccgaatacaacgcggataatcccaaagagtacaaattttctggtaagcgcattaagcgcggcctgtatcgcactaaatcaggaaaacttattaacgcagacgtgaatggggcattgaatattttaaaaaaaagcaaggctgttgatttgtctgtcttgtgcagttctggtgaggtagacaccccgcaacgtattcgcatcgcgtgataacctaggctgctgccaccgctgagcaataactagcataaccccttggggcctctaaacgggtcttgaggggttttttgctgaaacctcaggcatttgagaagcacacggtcacactgcttccggtagtcaataaaccggtaaaccagcaatagacataagcggctatttaacgaccctgccctgaaccgacgaccgggtcatcgtggccggatcttgcggcccctcggcttgaacgaattgttagacattatttgccgactaccttggtgatctcgcctttcacgtagtggacaaattcttccaactgatctgcgcgcgaggccaagcgatcttcttcttgtccaagataagcctgtctagcttcaagtatgacgggctgatactgggccggcaggcgctccattgcccagtcggcagcgacatccttcggcgcgattttgccggttactgcgctgtaccaaatgcgggacaacgtaagcactacatttcgctcatcgccagcccagtcgggcggcgagttccatagcgttaaggtttcatttagcgcctcaaatagatcctgttcaggaaccggatcaaagagttcctccgccgctggacctaccaaggcaacgctatgttctcttgcttttgtcagcaagatagccagatcaatgtcgatcgtggctggctcgaagatacctgcaagaatgtcattgcgctgccattctccaaattgcagttcgcgcttagctggataacgccacggaatgatgtcgtcgtgcacaacaatggtgacttctacagcgcggagaatctcgctctctccaggggaagccgaagtttccaaaaggtcgttgatcaaagctcgccgcgttgtttcatcaagccttacggt

SEQ ID NO: 176 - DNA, 5003 bp, synthetic construct
  source 1..5003: mol_type = other DNA
caccgtaaccagcaaatcaatatcactgtgtggcttcaggccgccatccactgcggagccgtacaaatgtacggccagcaacgtcggttcgagatggcgctcgatgacgccaactacctctgatagttgagtcgatacttcggcgatcaccgcttccctcatactcttcctttttcaatattattgaagcatttatcagggttattgtctcatgagcggatacatatttgaatgtatttagaaaaataaacaaatagctagctcactcggtcgctacgctccgggcgtgagactgcggcgggcgctgcggacacatacaaagttacccacagattccgtggataagcaggggactaacatgtgaggcaaaacagcagggccgcgccggtggcgtttttccataggctccgccctcctgccagagttcacataaacagacgcttttccggtgcatctgtgggagccgtgaggctcaaccatgaatctgacagtacgggcgaaacccgacaggacttaaagatccccaccgtttccggcgggtcgctccctcttgcgctctcctgttccgaccctgccgtttaccggatacctgttccgcctttctcccttacgggaagtgtggcgctttctcatagctcacacactggtatctcggctcggtgtaggtcgttcgctccaagctgggctgtaagcaagaactccccgttcagcccgactgctgcgccttatccggtaactgttcacttgagtccaacccggaaaagcacggtaaaacgccactggcagcagccattggtaactgggagttcgcagaggatttgtttagctaaacacgcggttgctcttgaagtgtgcgccaaagtccggctacactggaaggacagatttggttgctgtgctctgcgaaagccagttaccacggttaagcagttccccaactgacttaaccttcgatcaaaccacctccccaggtggttttttcgtttacagggcaaaagattacgcgcagaaaaaaaggatctcaagaagatcctttgatcttttctactgaaccgctctagatttcagtgcaatttatctcttcaaatgtagcacctgaagtcagccccatacgatataagttgtaattctcatgttagtcatgccccgcgcccaccggaaggagctgactgggttgaaggctctcaagggcatcggtcgagatcccggtgcctaatgagtgagctaacttacattaattgcgttgcgctcactgcccgctttccagtcgggaaacctgtcgtgccagctgcattaatgaatcggccaacgcgcggggagaggcggtttgcgtattgggcgccagggtggtttttcttttcaccagtgagacgggcaacagctgattgcccttcaccgcctggccctgagagagttgcagcaagcggtccacgctggtttgccccagcaggcgaaaatcctgtttgatggtggttaacggcgggatataacatgagctgtcttcggtatcgtcgtatcccactaccgagatgtccgcaccaacgcgcagcccggactcggtaatggcgcgcattgcgcccagcgccatctgatcgttggcaaccagcatcgcagtgggaacgatgccctcattcagcatttgcatggtttgttgaaaaccggacatggcactccagtcgccttcccgttccgctatcggctgaatttgattgcgagtgagatatttatgccagccagccagacgcagacgcgccgagacagaacttaatgggcccgctaacagcgcgatttgctggtgacccaatgcgaccagatgctccacgcccagtcgcgtaccgtcttcatgggagaaaataatactgttgatgggtgtctggtcagagacatcaagaaataacgccggaacattagtgcaggcagcttccacagcaatggcatcctggtcatccagcggatagttaatgatcagcccactgacgcgttgcgcgagaagattgtgcaccgccgctttacaggcttcgacgccgcttcgttctaccatcgacaccaccacgctggcacccagttgatcggcgcgagatttaatcgccgcgacaatttgcgacggcgcgtgcagggccagactggaggtggcaacgccaatcagcaacgactgtttgcccgccagttgttgtgccacgcggttgggaatgtaattcagctccgccatcgccgcttccactttttcccgcgttttcgcagaaacgtggctggcctggttcaccacgcgggaaacggtctgataagagacaccggcatactctgcgacatcgtataacgttactggtttcacattcaccaccctgaattgactctcttccgggcgctatcatgccataccgcgaaaggttttgcgccattcgatggtgtccgggattgacagctagctcagtcctaggtataatgctagcgtggagatatacctcgagttaagcgcggcttgtatcgaacaaagtctggcaaactaattaatgctgatgtcaatggcgcattaaacatcttaaagaaaagtaaagctgtagacctgagtgtcttatgctctagcggcgaagtggacacgcctcaaagaataaggattgcttgaagcagtcaaacttctttggaagcccccacttcaaattttcgctagaaaattaagtgggggtagttcaccagccggaaaacctaccggattgatggtagtggtcaaatgctcgcggccgcaataactagcataaccccttggggcctctaaacgggtcttgaggggttttttgctgaagtcgattttacggctagctcagtcctaggtactatgctagcgtggagatatacggtaccaaggagatataccatgggctatttttgcatcaagcagcagcttaatgggttgacgaaggaagagtacctgacactgcgtgagttgtgccatattgccaaaaacatgtacaacgttggcctttacaacgtacgtcagtactattttgagcataaggagttcttaaattacgaaaagaactatcacttggcgaagactaatgaaaactacaagttactgaactcgaacatggctcaacaaatcttgaaaaaagtaaatgaagccttcaaaagtttcttcggtcttatttcgcttgccaaacaaggtaaatacgaccataaagcaatctcgattcccaaatacttaaagaaagacggtttccattcgttaatcatcggccaaatccgcattgacggaaataagttcacgattccatactctcgcttattcaaaaagacacataagcccattacaatcactattccaccagtgttacttgataaaaagattaagcagatcgaaatcattccgaaacaccatgcacgtttcttcgagatccagtacaagtacgaaatgcctgaagatcagcgcgaacttaatgatcagaaggcgcttgcgattgacttggggcttaataacttggctacatgtgtaacctcagacggacgttctttcattattgacggccgtcgtcttaaatctatcaaccaatggttcaataaggaaaacgctcgcttgcagtctattaaagataaacagaagattaagggaaccacgcgtaaacaagcactgcttgcgatgaatcgtaataacaaggtgaacgactatatcaataagacctgccgctatatcattaactactgtatcgaaaatcaaattggcaagctggtaatcgggtacgccgaaacatggcagcgcaacatgaatttgggcaagaaaaccaaccaaaacttcgtcaatatccctcttggaaacattaaggagaagttagaatacctttgtgagttctatgggatcgagtttttgaagcaagaagagtcgtatacaagtcaagcgtcgttttttgatggagatgaaatccccgaatacaacgcggataatcccaaagagtacaaattttctggtaagcgcattaagcgcggcctgtatcgcactaaatcaggaaaacttattaacgcagacgtgaatggggcattgaatattttaaaaaaaagcaaggctgttgatttgtctgtcttgtgcagttctggtgaggtagacaccccgcaacgtattcgcatcgcgtgataacctaggctgctgccaccgctgagcaataactagcataaccccttggggcctctaaacgggtcttgaggggttttttgctgaaacctcaggcatttgagaagcacacggtcacactgcttccggtagtcaataaaccggtaaaccagcaatagacataagcggctatttaacgaccctgccctgaaccgacgaccgggtcatcgtggccggatcttgcggcccctcggcttgaacgaattgttagacattatttgccgactaccttggtgatctcgcctttcacgtagtggacaaattcttccaactgatctgcgcgcgaggccaagcgatcttcttcttgtccaagataagcctgtctagcttcaagtatgacgggctgatactgggccggcaggcgctccattgcccagtcggcagcgacatccttcggcgcgattttgccggttactgcgctgtaccaaatgcgggacaacgtaagcactacatttcgctcatcgccagcccagtcgggcggcgagttccatagcgttaaggtttcatttagcgcctcaaatagatcctgttcaggaaccggatcaaagagttcctccgccgctggacctaccaaggcaacgctatgttctcttgcttttgtcagcaagatagccagatcaatgtcgatcgtggctggctcgaagatacctgcaagaatgtcattgcgctgccattctccaaattgcagttcgcgcttagctggataacgccacggaatgatgtcgtcgtgcacaacaatggtgacttctacagcgcggagaatctcgctctctccaggggaagccgaagtttccaaaaggtcgttgatcaaagctcgccgcgttgtttcatcaagccttacggt

SEQ ID NO: 177 - DNA, 5004 bp, synthetic construct
  source 1..5004: mol_type = other DNA
caccgtaaccagcaaatcaatatcactgtgtggcttcaggccgccatccactgcggagccgtacaaatgtacggccagcaacgtcggttcgagatggcgctcgatgacgccaactacctctgatagttgagtcgatacttcggcgatcaccgcttccctcatactcttcctttttcaatattattgaagcatttatcagggttattgtctcatgagcggatacatatttgaatgtatttagaaaaataaacaaatagctagctcactcggtcgctacgctccgggcgtgagactgcggcgggcgctgcggacacatacaaagttacccacagattccgtggataagcaggggactaacatgtgaggcaaaacagcagggccgcgccggtggcgtttttccataggctccgccctcctgccagagttcacataaacagacgcttttccggtgcatctgtgggagccgtgaggctcaaccatgaatctgacagtacgggcgaaacccgacaggacttaaagatccccaccgtttccggcgggtcgctccctcttgcgctctcctgttccgaccctgccgtttaccggatacctgttccgcctttctcccttacgggaagtgtggcgctttctcatagctcacacactggtatctcggctcggtgtaggtcgttcgctccaagctgggctgtaagcaagaactccccgttcagcccgactgctgcgccttatccggtaactgttcacttgagtccaacccggaaaagcacggtaaaacgccactggcagcagccattggtaactgggagttcgcagaggatttgtttagctaaacacgcggttgctcttgaagtgtgcgccaaagtccggctacactggaaggacagatttggttgctgtgctctgcgaaagccagttaccacggttaagcagttccccaactgacttaaccttcgatcaaaccacctccccaggtggttttttcgtttacagggcaaaagattacgcgcagaaaaaaaggatctcaagaagatcctttgatcttttctactgaaccgctctagatttcagtgcaatttatctcttcaaatgtagcacctgaagtcagccccatacgatataagttgtaattctcatgttagtcatgccccgcgcccaccggaaggagctgactgggttgaaggctctcaagggcatcggtcgagatcccggtgcctaatgagtgagctaacttacattaattgcgttgcgctcactgcccgctttccagtcgggaaacctgtcgtgccagctgcattaatgaatcggccaacgcgcggggagaggcggtttgcgtattgggcgccagggtggtttttcttttcaccagtgagacgggcaacagctgattgcccttcaccgcctggccctgagagagttgcagcaagcggtccacgctggtttgccccagcaggcgaaaatcctgtttgatggtggttaacggcgggatataacatgagctgtcttcggtatcgtcgtatcccactaccgagatgtccgcaccaacgcgcagcccggactcggtaatggcgcgcattgcgcccagcgccatctgatcgttggcaaccagcatcgcagtgggaacgatgccctcattcagcatttgcatggtttgttgaaaaccggacatggcactccagtcgccttcccgttccgctatcggctgaatttgattgcgagtgagatatttatgccagccagccagacgcagacgcgccgagacagaacttaatgggcccgctaacagcgcgatttgctggtgacccaatgcgaccagatgctccacgcccagtcgcgtaccgtcttcatgggagaaaataatactgttgatgggtgtctggtcagagacatcaagaaataacgccggaacattagtgcaggcagcttccacagcaatggcatcctggtcatccagcggatagttaatgatcagcccactgacgcgttgcgcgagaagattgtgcaccgccgctttacaggcttcgacgccgcttcgttctaccatcgacaccaccacgctggcacccagttgatcggcgcgagatttaatcgccgcgacaatttgcgacggcgcgtgcagggccagactggaggtggcaacgccaatcagcaacgactgtttgcccgccagttgttgtgccacgcggttgggaatgtaattcagctccgccatcgccgcttccactttttcccgcgttttcgcagaaacgtggctggcctggttcaccacgcgggaaacggtctgataagagacaccggcatactctgcgacatcgtataacgttactggtttcacattcaccaccctgaattgactctcttccgggcgctatcatgccataccgcgaaaggttttgcgccattcgatggtgtccgggattgacagctagctcagtcctaggtataatgctagcgtggagatatacctcgagttaagcgcggcttgtatcgaacaaagtctggcaaactaattaatgctgatgtcaatggcgcattaaacatcttaaagaaaagtaaagctgtagacctgagtgtcttatgctctagcggcgaagtggacacgcctcaaagaataaggattgcttgaagcagtcaaacttctttggaagcccccacttcaaattttcgctagaaaattaagtgggggtagttcacctgtggtgcaacgggcgctgggtcggttacggccaggacactcgcggccgcaataactagcataaccccttggggcctctaaacgggtcttgaggggttttttgctgaagtcgacttttacggctagctcagtcctaggtactatgctagcgtggagatatacggtaccaaggagatataccatgggctatttttgcatcaagcagcagcttaatgggttgacgaaggaagagtacctgacactgcgtgagttgtgccatattgccaaaaacatgtacaacgttggcctttacaacgtacgtcagtactattttgagcataaggagttcttaaattacgaaaagaactatcacttggcgaagactaatgaaaactacaagttactgaactcgaacatggctcaacaaatcttgaaaaaagtaaatgaagccttcaaaagtttcttcggtcttatttcgcttgccaaacaaggtaaatacgaccataaagcaatctcgattcccaaatacttaaagaaagacggtttccattcgttaatcatcggccaaatccgcattgacggaaataagttcacgattccatactctcgcttattcaaaaagacacataagcccattacaatcactattccaccagtgttacttgataaaaagattaagcagatcgaaatcattccgaaacaccatgcacgtttcttcgagatccagtacaagtacgaaatgcctgaagatcagcgcgaacttaatgatcagaaggcgcttgcgattgacttggggcttaataacttggctacatgtgtaacctcagacggacgttctttcattattgacggccgtcgtcttaaatctatcaaccaatggttcaataaggaaaacgctcgcttgcagtctattaaagataaacagaagattaagggaaccacgcgtaaacaagcactgcttgcgatgaatcgtaataacaaggtgaacgactatatcaataagacctgccgctatatcattaactactgtatcgaaaatcaaattggcaagctggtaatcgggtacgccgaaacatggcagcgcaacatgaatttgggcaagaaaaccaaccaaaacttcgtcaatatccctcttggaaacattaaggagaagttagaatacctttgtgagttctatgggatcgagtttttgaagcaagaagagtcgtatacaagtcaagcgtcgttttttgatggagatgaaatccccgaatacaacgcggataatcccaaagagtacaaattttctggtaagcgcattaagcgcggcctgtatcgcactaaatcaggaaaacttattaacgcagacgtgaatggggcattgaatattttaaaaaaaagcaaggctgttgatttgtctgtcttgtgcagttctggtgaggtagacaccccgcaacgtattcgcatcgcgtgataacctaggctgctgccaccgctgagcaataactagcataaccccttggggcctctaaacgggtcttgaggggttttttgctgaaacctcaggcatttgagaagcacacggtcacactgcttccggtagtcaataaaccggtaaaccagcaatagacataagcggctatttaacgaccctgccctgaaccgacgaccgggtcatcgtggccggatcttgcggcccctcggcttgaacgaattgttagacattatttgccgactaccttggtgatctcgcctttcacgtagtggacaaattcttccaactgatctgcgcgcgaggccaagcgatcttcttcttgtccaagataagcctgtctagcttcaagtatgacgggctgatactgggccggcaggcgctccattgcccagtcggcagcgacatccttcggcgcgattttgccggttactgcgctgtaccaaatgcgggacaacgtaagcactacatttcgctcatcgccagcccagtcgggcggcgagttccatagcgttaaggtttcatttagcgcctcaaatagatcctgttcaggaaccggatcaaagagttcctccgccgctggacctaccaaggcaacgctatgttctcttgcttttgtcagcaagatagccagatcaatgtcgatcgtggctggctcgaagatacctgcaagaatgtcattgcgctgccattctccaaattgcagttcgcgcttagctggataacgccacggaatgatgtcgtcgtgcacaacaatggtgacttctacagcgcggagaatctcgctctctccaggggaagccgaagtttccaaaaggtcgttgatcaaagctcgccgcgttgtttcatcaagccttacggt

SEQ ID NO: 178 - DNA, 5132 bp, synthetic construct
  source 1..5132: mol_type = other DNA
ttttctactgaaccgctctagatttcagtgcaatttatctcttcaaatgtagcacctgaagtcagccccatacgatataagttgtaattctcatgttagtcatgccccgcgcccaccggaaggagctgactgggttgaaggctctcaagggcatcggtcgagatcccggtgcctaatgagtgagctaacttacattaattgcgttgcgctcactgcccgctttccagtcgggaaacctgtcgtgccagctgcattaatgaatcggccaacgcgcggggagaggcggtttgcgtattgggcgccagggtggtttttcttttcaccagtgagacgggcaacagctgattgcccttcaccgcctggccctgagagagttgcagcaagcggtccacgctggtttgccccagcaggcgaaaatcctgtttgatggtggttaacggcgggatataacatgagctgtcttcggtatcgtcgtatcccactaccgagatgtccgcaccaacgcgcagcccggactcggtaatggcgcgcattgcgcccagcgccatctgatcgttggcaaccagcatcgcagtgggaacgatgccctcattcagcatttgcatggtttgttgaaaaccggacatggcactccagtcgccttcccgttccgctatcggctgaatttgattgcgagtgagatatttatgccagccagccagacgcagacgcgccgagacagaacttaatgggcccgctaacagcgcgatttgctggtgacccaatgcgaccagatgctccacgcccagtcgcgtaccgtcttcatgggagaaaataatactgttgatgggtgtctggtcagagacatcaagaaataacgccggaacattagtgcaggcagcttccacagcaatggcatcctggtcatccagcggatagttaatgatcagcccactgacgcgttgcgcgagaagattgtgcaccgccgctttacaggcttcgacgccgcttcgttctaccatcgacaccaccacgctggcacccagttgatcggcgcgagatttaatcgccgcgacaatttgcgacggcgcgtgcagggccagactggaggtggcaacgccaatcagcaacgactgtttgcccgccagttgttgtgccacgcggttgggaatgtaattcagctccgccatcgccgcttccactttttcccgcgttttcgcagaaacgtggctggcctggttcaccacgcgggaaacggtctgataagagacaccggcatactctgcgacatcgtataacgttactggtttcacattcaccaccctgaattgactctcttccgggcgctatcatgccataccgcgaaaggttttgcgccattcgatggtgtccgggagaaattaatacgactcactataggcctcgagtgtcctggccgtaaccgacccagcgcccgttgcaccacaggtcaactccccaccacttaaagcctaacggcttttgaagtgggggcttggcaagccctagttgactaccctcagccattcaatggctacgttggaagggtcatgacacttacggatgctcctccagtccgtaaccctgtcgcagatggttaaaagctctgatgggtaggagcggtgctgtctgccgaacaagcccttccaacattggggaggaggaactcactcctgaaaggaggtacacgtcttgttcgtgtacattatcaataagcatggaaaaccactcgcggccgcaataactagcataaccccttggggcctctaaacgggtcttgaggggttttttgctgaagtcgacttaatacgactcactataggggaattgtgagcggataacaattcccaggtaccaaggagatatacatggactacaaagaccatgacggtgattataaagatcatgacatcgattacaaggatgacgatgacaagggaggaagcggatcgatggggtttgtatacattatcaataagcatggaaaaccgttaatgccgtgtagcccccgcaaagcacgtctgcttctgaaacaaaagaaagcaaaagtagttcgtcgtacaccgtttacgattcaattgctgtatggcagctccggctacaagcagccggtatcacttggcgtggcggatggcacccgccatgtcggcatttctgctactaccaagaaggatgtattgttcgaggcagaggcgcagttgcgtacggatattgtggaattgttagctatccgccgccagttccgccgctcgcgccgcaaccgcaagacccgttaccgtgaggctcgtttcttgaaccgtcgtaaacccgaagggtggttgccgccttcaatccaacataagattaattcgcatattaagctgattgatttagttcataacattttgcccgtgacgtctgttactattgaagtagccgcgttcgacacccagaaattaaaaaacttgaacattcgcggcgtcgagtaccaacagggggaacaaatgggtttttggaacgtacgcgaatacgtgttatatcgcgacaaccacacctgccagtattgtaagggtaagaaaaaagatccagtattgcaagtagccgccattgaatctcgcaagacgggtggcgactcgcccgataatttgattactttgtgcaagacgtgccatcatgagattcatgagaaaggcctggaacatatttttcaacgcaaacgcccgccaatgcgtgacgcgtctcagatgacggccatgcgttgggcgatgttttcccgcatccgtgagaagtacagccacgcgaacatcacatatggttatatcaccaaatgtattcgcatcgcgaacgggttaagcaagtcgcacatggtagacgcacgttgcatttcaggcaatcctttagcgaaaccgagtggtaccgtatatttgctgaagttcgttcgcaagaataatcgccaattacataaggcgacaattttgaaaggcggtaagcgtaaatccaacaaggctccccgcttcgtaaaggggttccagctgttcgataaagtcgtgtatgagcgtaaagagtgttttattttcgggcgtcgttcttccggctacttcgatttacgtctgcttgacgggactaaagtccacgcttcggccagctggaaaaaattaaaacgtgttgaacacgcaagtacattactgattgaacgccgtaagggggatagttcgccaaccttcgcattagcgtgataacctaggctgctgccaccgctgagcaataactagcataaccccttggggcctctaaacgggtcttgaggggttttttgctgaaacctcaggcatttgagaagcacacggtcacactgcttccggtagtcaataaaccggtaaaccagcaatagacataagcggctatttaacgaccctgccctgaaccgacgaccgggtcatcgtggccggatcttgcggcccctcggcttgaacgaattgttagacattatttgccgactaccttggtgatctcgcctttcacgtagtggacaaattcttccaactgatctgcgcgcgaggccaagcgatcttcttcttgtccaagataagcctgtctagcttcaagtatgacgggctgatactgggccggcaggcgctccattgcccagtcggcagcgacatccttcggcgcgattttgccggttactgcgctgtaccaaatgcgggacaacgtaagcactacatttcgctcatcgccagcccagtcgggcggcgagttccatagcgttaaggtttcatttagcgcctcaaatagatcctgttcaggaaccggatcaaagagttcctccgccgctggacctaccaaggcaacgctatgttctcttgcttttgtcagcaagatagccagatcaatgtcgatcgtggctggctcgaagatacctgcaagaatgtcattgcgctgccattctccaaattgcagttcgcgcttagctggataacgccacggaatgatgtcgtcgtgcacaacaatggtgacttctacagcgcggagaatctcgctctctccaggggaagccgaagtttccaaaaggtcgttgatcaaagctcgccgcgttgtttcatcaagccttacggtcaccgtaaccagcaaatcaatatcactgtgtggcttcaggccgccatccactgcggagccgtacaaatgtacggccagcaacgtcggttcgagatggcgctcgatgacgccaactacctctgatagttgagtcgatacttcggcgatcaccgcttccctcatactcttcctttttcaatattattgaagcatttatcagggttattgtctcatgagcggatacatatttgaatgtatttagaaaaataaacaaatagctagctcactcggtcgctacgctccgggcgtgagactgcggcgggcgctgcggacacatacaaagttacccacagattccgtggataagcaggggactaacatgtgaggcaaaacagcagggccgcgccggtggcgtttttccataggctccgccctcctgccagagttcacataaacagacgcttttccggtgcatctgtgggagccgtgaggctcaaccatgaatctgacagtacgggcgaaacccgacaggacttaaagatccccaccgtttccggcgggtcgctccctcttgcgctctcctgttccgaccctgccgtttaccggatacctgttccgcctttctcccttacgggaagtgtggcgctttctcatagctcacacactggtatctcggctcggtgtaggtcgttcgctccaagctgggctgtaagcaagaactccccgttcagcccgactgctgcgccttatccggtaactgttcacttgagtccaacccggaaaagcacggtaaaacgccactggcagcagccattggtaactgggagttcgcagaggatttgtttagctaaacacgcggttgctcttgaagtgtgcgccaaagtccggctacactggaaggacagatttggttgctgtgctctgcgaaagccagttaccacggttaagcagttccccaactgacttaaccttcgatcaaaccacctccccaggtggttttttcgtttacagggcaaaagattacgcgcagaaaaaaaggatctcaagaagatcctttgatc

SEQ ID NO: 179 - DNA, 5132 bp, synthetic construct
  source 1..5132: mol_type = other DNA
ttttctactgaaccgctctagatttcagtgcaatttatctcttcaaatgtagcacctgaagtcagccccatacgatataagttgtaattctcatgttagtcatgccccgcgcccaccggaaggagctgactgggttgaaggctctcaagggcatcggtcgagatcccggtgcctaatgagtgagctaacttacattaattgcgttgcgctcactgcccgctttccagtcgggaaacctgtcgtgccagctgcattaatgaatcggccaacgcgcggggagaggcggtttgcgtattgggcgccagggtggtttttcttttcaccagtgagacgggcaacagctgattgcccttcaccgcctggccctgagagagttgcagcaagcggtccacgctggtttgccccagcaggcgaaaatcctgtttgatggtggttaacggcgggatataacatgagctgtcttcggtatcgtcgtatcccactaccgagatgtccgcaccaacgcgcagcccggactcggtaatggcgcgcattgcgcccagcgccatctgatcgttggcaaccagcatcgcagtgggaacgatgccctcattcagcatttgcatggtttgttgaaaaccggacatggcactccagtcgccttcccgttccgctatcggctgaatttgattgcgagtgagatatttatgccagccagccagacgcagacgcgccgagacagaacttaatgggcccgctaacagcgcgatttgctggtgacccaatgcgaccagatgctccacgcccagtcgcgtaccgtcttcatgggagaaaataatactgttgatgggtgtctggtcagagacatcaagaaataacgccggaacattagtgcaggcagcttccacagcaatggcatcctggtcatccagcggatagttaatgatcagcccactgacgcgttgcgcgagaagattgtgcaccgccgctttacaggcttcgacgccgcttcgttctaccatcgacaccaccacgctggcacccagttgatcggcgcgagatttaatcgccgcgacaatttgcgacggcgcgtgcagggccagactggaggtggcaacgccaatcagcaacgactgtttgcccgccagttgttgtgccacgcggttgggaatgtaattcagctccgccatcgccgcttccactttttcccgcgttttcgcagaaacgtggctggcctggttcaccacgcgggaaacggtctgataagagacaccggcatactctgcgacatcgtataacgttactggtttcacattcaccaccctgaattgactctcttccgggcgctatcatgccataccgcgaaaggttttgcgccattcgatggtgtccgggagaaattaatacgactcactataggcctcgagcgcgccgagctcgaattcggatcctggctgtggtgatgatgtcaactccccaccacttaaagcctaacggcttttgaagtgggggcttggcaagccctagttgactaccctcagccattcaatggctacgttggaagggtcatgacacttacggatgctcctccagtccgtaaccctgtcgcagatggttaaaagctctgatgggtaggagcggtgctgtctgccgaacaagcccttccaacattggggaggaggaactcactcctgaaaggaggtacacgtcttgttcgtgtacattatcaataagcatggaaaaccactcgcggccgcaataactagcataaccccttggggcctctaaacgggtcttgaggggttttttgctgaagtcgacttaatacgactcactataggggaattgtgagcggataacaattcccaggtaccaaggagatatacatggactacaaagaccatgacggtgattataaagatcatgacatcgattacaaggatgacgatgacaagggaggaagcggatcgatggggtttgtatacattatcaataagcatggaaaaccgttaatgccgtgtagcccccgcaaagcacgtctgcttctgaaacaaaagaaagcaaaagtagttcgtcgtacaccgtttacgattcaattgctgtatggcagctccggctacaagcagccggtatcacttggcgtggcggatggcacccgccatgtcggcatttctgctactaccaagaaggatgtattgttcgaggcagaggcgcagttgcgtacggatattgtggaattgttagctatccgccgccagttccgccgctcgcgccgcaaccgcaagacccgttaccgtgaggctcgtttcttgaaccgtcgtaaacccgaagggtggttgccgccttcaatccaacataagattaattcgcatattaagctgattgatttagttcataacattttgcccgtgacgtctgttactattgaagtagccgcgttcgacacccagaaattaaaaaacttgaacattcgcggcgtcgagtaccaacagggggaacaaatgggtttttggaacgtacgcgaatacgtgttatatcgcgacaaccacacctgccagtattgtaagggtaagaaaaaagatccagtattgcaagtagccgccattgaatctcgcaagacgggtggcgactcgcccgataatttgattactttgtgcaagacgtgccatcatgagattcatgagaaaggcctggaacatatttttcaacgcaaacgcccgccaatgcgtgacgcgtctcagatgacggccatgcgttgggcgatgttttcccgcatccgtgagaagtacagccacgcgaacatcacatatggttatatcaccaaatgtattcgcatcgcgaacgggttaagcaagtcgcacatggtagacgcacgttgcatttcaggcaatcctttagcgaaaccgagtggtaccgtatatttgctgaagttcgttcgcaagaataatcgccaattacataaggcgacaattttgaaaggcggtaagcgtaaatccaacaaggctccccgcttcgtaaaggggttccagctgttcgataaagtcgtgtatgagcgtaaagagtgttttattttcgggcgtcgttcttccggctacttcgatttacgtctgcttgacgggactaaagtccacgcttcggccagctggaaaaaattaaaacgtgttgaacacgcaagtacattactgattgaacgccgtaagggggatagttcgccaaccttcgcattagcgtgataacctaggctgctgccaccgctgagcaataactagcataaccccttggggcctctaaacgggtcttgaggggttttttgctgaaacctcaggcatttgagaagcacacggtcacactgcttccggtagtcaataaaccggtaaaccagcaatagacataagcggctatttaacgaccctgccctgaaccgacgaccgggtcatcgtggccggatcttgcggcccctcggcttgaacgaattgttagacattatttgccgactaccttggtgatctcgcctttcacgtagtggacaaattcttccaactgatctgcgcgcgaggccaagcgatcttcttcttgtccaagataagcctgtctagcttcaagtatgacgggctgatactgggccggcaggcgctccattgcccagtcggcagcgacatccttcggcgcgattttgccggttactgcgctgtaccaaatgcgggacaacgtaagcactacatttcgctcatcgccagcccagtcgggcggcgagttccatagcgttaaggtttcatttagcgcctcaaatagatcctgttcaggaaccggatcaaagagttcctccgccgctggacctaccaaggcaacgctatgttctcttgcttttgtcagcaagatagccagatcaatgtcgatcgtggctggctcgaagatacctgcaagaatgtcattgcgctgccattctccaaattgcagttcgcgcttagctggataacgccacggaatgatgtcgtcgtgcacaacaatggtgacttctacagcgcggagaatctcgctctctccaggggaagccgaagtttccaaaaggtcgttgatcaaagctcgccgcgttgtttcatcaagccttacggtcaccgtaaccagcaaatcaatatcactgtgtggcttcaggccgccatccactgcggagccgtacaaatgtacggccagcaacgtcggttcgagatggcgctcgatgacgccaactacctctgatagttgagtcgatacttcggcgatcaccgcttccctcatactcttcctttttcaatattattgaagcatttatcagggttattgtctcatgagcggatacatatttgaatgtatttagaaaaataaacaaatagctagctcactcggtcgctacgctccgggcgtgagactgcggcgggcgctgcggacacatacaaagttacccacagattccgtggataagcaggggactaacatgtgaggcaaaacagcagggccgcgccggtggcgtttttccataggctccgccctcctgccagagttcacataaacagacgcttttccggtgcatctgtgggagccgtgaggctcaaccatgaatctgacagtacgggcgaaacccgacaggacttaaagatccccaccgtttccggcgggtcgctccctcttgcgctctcctgttccgaccctgccgtttaccggatacctgttccgcctttctcccttacgggaagtgtggcgctttctcatagctcacacactggtatctcggctcggtgtaggtcgttcgctccaagctgggctgtaagcaagaactccccgttcagcccgactgctgcgccttatccggtaactgttcacttgagtccaacccggaaaagcacggtaaaacgccactggcagcagccattggtaactgggagttcgcagaggatttgtttagctaaacacgcggttgctcttgaagtgtgcgccaaagtccggctacactggaaggacagatttggttgctgtgctctgcgaaagccagttaccacggttaagcagttccccaactgacttaaccttcgatcaaaccacctccccaggtggttttttcgtttacagggcaaaagattacgcgcagaaaaaaaggatctcaagaagatcctttgatc

SEQ ID NO: 180 - DNA, 5065 bp, synthetic construct
  source 1..5065: mol_type = other DNA
agtcagccccatacgatataagttgtaattctcatgttagtcatgccccgcgcccaccggaaggagctgactgggttgaaggctctcaagggcatcggtcgagatcccggtgcctaatgagtgagctaacttacattaattgcgttgcgctcactgcccgctttccagtcgggaaacctgtcgtgccagctgcattaatgaatcggccaacgcgcggggagaggcggtttgcgtattgggcgccagggtggtttttcttttcaccagtgagacgggcaacagctgattgcccttcaccgcctggccctgagagagttgcagcaagcggtccacgctggtttgccccagcaggcgaaaatcctgtttgatggtggttaacggcgggatataacatgagctgtcttcggtatcgtcgtatcccactaccgagatgtccgcaccaacgcgcagcccggactcggtaatggcgcgcattgcgcccagcgccatctgatcgttggcaaccagcatcgcagtgggaacgatgccctcattcagcatttgcatggtttgttgaaaaccggacatggcactccagtcgccttcccgttccgctatcggctgaatttgattgcgagtgagatatttatgccagccagccagacgcagacgcgccgagacagaacttaatgggcccgctaacagcgcgatttgctggtgacccaatgcgaccagatgctccacgcccagtcgcgtaccgtcttcatgggagaaaataatactgttgatgggtgtctggtcagagacatcaagaaataacgccggaacattagtgcaggcagcttccacagcaatggcatcctggtcatccagcggatagttaatgatcagcccactgacgcgttgcgcgagaagattgtgcaccgccgctttacaggcttcgacgccgcttcgttctaccatcgacaccaccacgctggcacccagttgatcggcgcgagatttaatcgccgcgacaatttgcgacggcgcgtgcagggccagactggaggtggcaacgccaatcagcaacgactgtttgcccgccagttgttgtgccacgcggttgggaatgtaattcagctccgccatcgccgcttccactttttcccgcgttttcgcagaaacgtggctggcctggttcaccacgcgggaaacggtctgataagagacaccggcatactctgcgacatcgtataacgttactggtttcacattcaccaccctgaattgactctcttccgggcgctatcatgccataccgcgaaaggttttgcgccattcgatggtgtccgggagaaattaatacgactcactataggcctcgagttaagcgcggcttgtatcgaacaaagtctggcaaactaattaatgctgatgtcaatggcgcattaaacatcttaaagaaaagtaaagctgtagacctgagtgtcttatgctctagcggcgaagtggacacgcctcaaagaataaggattgcttgaagcagtcaaacttctttggaagcccccacttcaaattttcgctagaaaattaagtgggggtagttcacccgggcaaaccatcgaagtgaccagcgaatacctgttccgctcgcggccgcaataactagcataaccccttggggcctctaaacgggtcttgaggggttttttgctgaagtcgacttaatacgactcactataggggaattgtgagcggataacaattcccaggtaccaaggagatataccatggactacaaagaccatgacggtgattataaagatcatgacatcgattacaaggatgacgatgacaagggaggaagcggatcgatgggctatttttgcatcaagcagcagcttaatgggttgacgaaggaagagtacctgacactgcgtgagttgtgccatattgccaaaaacatgtacaacgttggcctttacaacgtacgtcagtactattttgagcataaggagttcttaaattacgaaaagaactatcacttggcgaagactaatgaaaactacaagttactgaactcgaacatggctcaacaaatcttgaaaaaagtaaatgaagccttcaaaagtttcttcggtcttatttcgcttgccaaacaaggtaaatacgaccataaagcaatctcgattcccaaatacttaaagaaagacggtttccattcgttaatcatcggccaaatccgcattgacggaaataagttcacgattccatactctcgcttattcaaaaagacacataagcccattacaatcactattccaccagtgttacttgataaaaagattaagcagatcgaaatcattccgaaacaccatgcacgtttcttcgagatccagtacaagtacgaaatgcctgaagatcagcgcgaacttaatgatcagaaggcgcttgcgattgccttggggcttaataacttggctacatgtgtaacctcagacggacgttctttcattattgacggccgtcgtcttaaatctatcaaccaatggttcaataaggaaaacgctcgcttgcagtctattaaagataaacagaagattaagggaaccacgcgtaaacaagcactgcttgcgatgaatcgtaataacaaggtgaacgactatatcaataagacctgccgctatatcattaactactgtatcgaaaatcaaattggcaagctggtaatcgggtacgccgaaacatggcagcgcaacatgaatttgggcaagaaaaccaaccaaaacttcgtcaatatccctcttggaaacattaaggagaagttagaatacctttgtgagttctatgggatcgagtttttgaagcaagaagagtcgtatacaagtcaagcgtcgttttttgatggagatgaaatccccgaatacaacgcggataatcccaaagagtacaaattttctggtaagcgcattaagcgcggcctgtatcgcactaaatcaggaaaacttattaacgcagacgtgaatggggcattgaatattttaaaaaaaagcaaggctgttgatttgtctgtcttgtgcagttctggtgaggtagacaccccgcaacgtattcgcatcgcgtgataacctaggctgctgccaccgctgagcaataactagcataaccccttggggcctctaaacgggtcttgaggggttttttgctgaaacctcaggcatttgagaagcacacggtcacactgcttccggtagtcaataaaccggtaaaccagcaatagacataagcggctatttaacgaccctgccctgaaccgacgaccgggtcatcgtggccggatcttgcggcccctcggcttgaacgaattgttagacattatttgccgactaccttggtgatctcgcctttcacgtagtggacaaattcttccaactgatctgcgcgcgaggccaagcgatcttcttcttgtccaagataagcctgtctagcttcaagtatgacgggctgatactgggccggcaggcgctccattgcccagtcggcagcgacatccttcggcgcgattttgccggttactgcgctgtaccaaatgcgggacaacgtaagcactacatttcgctcatcgccagcccagtcgggcggcgagttccatagcgttaaggtttcatttagcgcctcaaatagatcctgttcaggaaccggatcaaagagttcctccgccgctggacctaccaaggcaacgctatgttctcttgcttttgtcagcaagatagccagatcaatgtcgatcgtggctggctcgaagatacctgcaagaatgtcattgcgctgccattctccaaattgcagttcgcgcttagctggataacgccacggaatgatgtcgtcgtgcacaacaatggtgacttctacagcgcggagaatctcgctctctccaggggaagccgaagtttccaaaaggtcgttgatcaaagctcgccgcgttgtttcatcaagccttacggtcaccgtaaccagcaaatcaatatcactgtgtggcttcaggccgccatccactgcggagccgtacaaatgtacggccagcaacgtcggttcgagatggcgctcgatgacgccaactacctctgatagttgagtcgatacttcggcgatcaccgcttccctcatactcttcctttttcaatattattgaagcatttatcagggttattgtctcatgagcggatacatatttgaatgtatttagaaaaataaacaaatagctagctcactcggtcgctacgctccgggcgtgagactgcggcgggcgctgcggacacatacaaagttacccacagattccgtggataagcaggggactaacatgtgaggcaaaacagcagggccgcgccggtggcgtttttccataggctccgccctcctgccagagttcacataaacagacgcttttccggtgcatctgtgggagccgtgaggctcaaccatgaatctgacagtacgggcgaaacccgacaggacttaaagatccccaccgtttccggcgggtcgctccctcttgcgctctcctgttccgaccctgccgtttaccggatacctgttccgcctttctcccttacgggaagtgtggcgctttctcatagctcacacactggtatctcggctcggtgtaggtcgttcgctccaagctgggctgtaagcaagaactccccgttcagcccgactgctgcgccttatccggtaactgttcacttgagtccaacccggaaaagcacggtaaaacgccactggcagcagccattggtaactgggagttcgcagaggatttgtttagctaaacacgcggttgctcttgaagtgtgcgccaaagtccggctacactggaaggacagatttggttgctgtgctctgcgaaagccagttaccacggttaagcagttccccaactgacttaaccttcgatcaaaccacctccccaggtggttttttcgtttacagggcaaaagattacgcgcagaaaaaaaggatctcaagaagatcctttgatcttttctactgaaccgctctagatttcagtgcaatttatctcttcaaatgtagcacctga

SEQ ID NO: 181 - DNA, 5065 bp, synthetic construct
  source 1..5065: mol_type = other DNA
agtcagccccatacgatataagttgtaattctcatgttagtcatgccccgcgcccaccggaaggagctgactgggttgaaggctctcaagggcatcggtcgagatcccggtgcctaatgagtgagctaacttacattaattgcgttgcgctcactgcccgctttccagtcgggaaacctgtcgtgccagctgcattaatgaatcggccaacgcgcggggagaggcggtttgcgtattgggcgccagggtggtttttcttttcaccagtgagacgggcaacagctgattgcccttcaccgcctggccctgagagagttgcagcaagcggtccacgctggtttgccccagcaggcgaaaatcctgtttgatggtggttaacggcgggatataacatgagctgtcttcggtatcgtcgtatcccactaccgagatgtccgcaccaacgcgcagcccggactcggtaatggcgcgcattgcgcccagcgccatctgatcgttggcaaccagcatcgcagtgggaacgatgccctcattcagcatttgcatggtttgttgaaaaccggacatggcactccagtcgccttcccgttccgctatcggctgaatttgattgcgagtgagatatttatgccagccagccagacgcagacgcgccgagacagaacttaatgggcccgctaacagcgcgatttgctggtgacccaatgcgaccagatgctccacgcccagtcgcgtaccgtcttcatgggagaaaataatactgttgatgggtgtctggtcagagacatcaagaaataacgccggaacattagtgcaggcagcttccacagcaatggcatcctggtcatccagcggatagttaatgatcagcccactgacgcgttgcgcgagaagattgtgcaccgccgctttacaggcttcgacgccgcttcgttctaccatcgacaccaccacgctggcacccagttgatcggcgcgagatttaatcgccgcgacaatttgcgacggcgcgtgcagggccagactggaggtggcaacgccaatcagcaacgactgtttgcccgccagttgttgtgccacgcggttgggaatgtaattcagctccgccatcgccgcttccactttttcccgcgttttcgcagaaacgtggctggcctggttcaccacgcgggaaacggtctgataagagacaccggcatactctgcgacatcgtataacgttactggtttcacattcaccaccctgaattgactctcttccgggcgctatcatgccataccgcgaaaggttttgcgccattcgatggtgtccgggagaaattaatacgactcactataggcctcgagttaagcgcggcttgtatcgaacaaagtctggcaaactaattaatgctgatgtcaatggcgcattaaacatcttaaagaaaagtaaagctgtagacctgagtgtcttatgctctagcggcgaagtggacacgcctcaaagaataaggattgcttgaagcagtcaaacttctttggaagcccccacttcaaattttcgctagaaaattaagtgggggtagttcacggacaagtggttcaccatgcgttgctttatggtatgatagctcgcggccgcaataactagcataaccccttggggcctctaaacgggtcttgaggggttttttgctgaagtcgacttaatacgactcactataggggaattgtgagcggataacaattcccaggtaccaaggagatataccatggactacaaagaccatgacggtgattataaagatcatgacatcgattacaaggatgacgatgacaagggaggaagcggatcgatgggctatttttgcatcaagcagcagcttaatgggttgacgaaggaagagtacctgacactgcgtgagttgtgccatattgccaaaaacatgtacaacgttggcctttacaacgtacgtcagtactattttgagcataaggagttcttaaattacgaaaagaactatcacttggcgaagactaatgaaaactacaagttactgaactcgaacatggctcaacaaatcttgaaaaaagtaaatgaagccttcaaaagtttcttcggtcttatttcgcttgccaaacaaggtaaatacgaccataaagcaatctcgattcccaaatacttaaagaaagacggtttccattcgttaatcatcggccaaatccgcattgacggaaataagttcacgattccatactctcgcttattcaaaaagacacataagcccattacaatcactattccaccagtgttacttgataaaaagattaagcagatcgaaatcattccgaaacaccatgcacgtttcttcgagatccagtacaagtacgaaatgcctgaagatcagcgcgaacttaatgatcagaaggcgcttgcgattgccttggggcttaataacttggctacatgtgtaacctcagacggacgttctttcattattgacggccgtcgtcttaaatctatcaaccaatggttcaataaggaaaacgctcgcttgcagtctattaaagataaacagaagattaagggaaccacgcgtaaacaagcactgcttgcgatgaatcgtaataacaaggtgaacgactatatcaataagacctgccgctatatcattaactactgtatcgaaaatcaaattggcaagctggtaatcgggtacgccgaaacatggcagcgcaacatgaatttgggcaagaaaaccaaccaaaacttcgtcaatatccctcttggaaacattaaggagaagttagaatacctttgtgagttctatgggatcgagtttttgaagcaagaagagtcgtatacaagtcaagcgtcgttttttgatggagatgaaatccccgaatacaacgcggataatcccaaagagtacaaattttctggtaagcgcattaagcgcggcctgtatcgcactaaatcaggaaaacttattaacgcagacgtgaatggggcattgaatattttaaaaaaaagcaaggctgttgatttgtctgtcttgtgcagttctggtgaggtagacaccccgcaacgtattcgcatcgcgtgataacctaggctgctgccaccgctgagcaataactagcataaccccttggggcctctaaacgggtcttgaggggttttttgctgaaacctcaggcatttgagaagcacacggtcacactgcttccggtagtcaataaaccggtaaaccagcaatagacataagcggctatttaacgaccctgccctgaaccgacgaccgggtcatcgtggccggatcttgcggcccctcggcttgaacgaattgttagacattatttgccgactaccttggtgatctcgcctttcacgtagtggacaaattcttccaactgatctgcgcgcgaggccaagcgatcttcttcttgtccaagataagcctgtctagcttcaagtatgacgggctgatactgggccggcaggcgctccattgcccagtcggcagcgacatccttcggcgcgattttgccggttactgcgctgtaccaaatgcgggacaacgtaagcactacatttcgctcatcgccagcccagtcgggcggcgagttccatagcgttaaggtttcatttagcgcctcaaatagatcctgttcaggaaccggatcaaagagttcctccgccgctggacctaccaaggcaacgctatgttctcttgcttttgtcagcaagatagccagatcaatgtcgatcgtggctggctcgaagatacctgcaagaatgtcattgcgctgccattctccaaattgcagttcgcgcttagctggataacgccacggaatgatgtcgtcgtgcacaacaatggtgacttctacagcgcggagaatctcgctctctccaggggaagccgaagtttccaaaaggtcgttgatcaaagctcgccgcgttgtttcatcaagccttacggtcaccgtaaccagcaaatcaatatcactgtgtggcttcaggccgccatccactgcggagccgtacaaatgtacggccagcaacgtcggttcgagatggcgctcgatgacgccaactacctctgatagttgagtcgatacttcggcgatcaccgcttccctcatactcttcctttttcaatattattgaagcatttatcagggttattgtctcatgagcggatacatatttgaatgtatttagaaaaataaacaaatagctagctcactcggtcgctacgctccgggcgtgagactgcggcgggcgctgcggacacatacaaagttacccacagattccgtggataagcaggggactaacatgtgaggcaaaacagcagggccgcgccggtggcgtttttccataggctccgccctcctgccagagttcacataaacagacgcttttccggtgcatctgtgggagccgtgaggctcaaccatgaatctgacagtacgggcgaaacccgacaggacttaaagatccccaccgtttccggcgggtcgctccctcttgcgctctcctgttccgaccctgccgtttaccggatacctgttccgcctttctcccttacgggaagtgtggcgctttctcatagctcacacactggtatctcggctcggtgtaggtcgttcgctccaagctgggctgtaagcaagaactccccgttcagcccgactgctgcgccttatccggtaactgttcacttgagtccaacccggaaaagcacggtaaaacgccactggcagcagccattggtaactgggagttcgcagaggatttgtttagctaaacacgcggttgctcttgaagtgtgcgccaaagtccggctacactggaaggacagatttggttgctgtgctctgcgaaagccagttaccacggttaagcagttccccaactgacttaaccttcgatcaaaccacctccccaggtggttttttcgtttacagggcaaaagattacgcgcagaaaaaaaggatctcaagaagatcctttgatcttttctactgaaccgctctagatttcagtgcaatttatctcttcaaatgtagcacctga

SEQ ID NO: 182 - DNA, 7981 bp, synthetic construct
  source 1..7981: mol_type = other DNA
tcactgcccgctttccagtcgggaaacctgtcgtgccagctgcattaatgaatcggccaacgcgcggggagaggcggtttgcgtattgggcgccagggtggtttttcttttcaccagtgagacgggcaacagctgattgcccttcaccgcctggccctgagagagttgcagcaagcggtccacgctggtttgccccagcaggcgaaaatcctgtttgatggtggttaacggcgggatataacatgagctgtcttcggtatcgtcgtatcccactaccgagatgtccgcaccaacgcgcagcccggactcggtaatggcgcgcattgcgcccagcgccatctgatcgttggcaaccagcatcgcagtgggaacgatgccctcattcagcatttgcatggtttgttgaaaaccggacatggcactccagtcgccttcccgttccgctatcggctgaatttgattgcgagtgagatatttatgccagccagccagacgcagacgcgccgagacagaacttaatgggcccgctaacagcgcgatttgctggtgacccaatgcgaccagatgctccacgcccagtcgcgtaccgtcttcatgggagaaaataatactgttgatgggtgtctggtcagagacatcaagaaataacgccggaacattagtgcaggcagcttccacagcaatggcatcctggtcatccagcggatagttaatgatcagcccactgacgcgttgcgcgagaagattgtgcaccgccgctttacaggcttcgacgccgcttcgttctaccatcgacaccaccacgctggcacccagttgatcggcgcgagatttaatcgccgcgacaatttgcgacggcgcgtgcagggccagactggaggtggcaacgccaatcagcaacgactgtttgcccgccagttgttgtgccacgcggttgggaatgtaattcagctccgccatcgccgcttccactttttcccgcgttttcgcagaaacgtggctggcctggttcaccacgcgggaaacggtctgataagagacaccggcatactctgcgacatcgtataacgttactggtttcacattcaccaccctgaattgactctcttccgggcgctatcatgccataccgcgaaaggttttgcgccattcgatggtgtccgggatctcgacgctctcccttatgcgactcctgcattaggaaattaatacgactcactatagtgatttcagccgcgctgtacgttttagagctagaaatagcaagttaaaataaggctagtccgttatcaacttgaaaaagtggcaccgagtcggtgctttttttggtagtgcagcgcgatcgtaatcaggatcccatggtacgcgtgctagaggcatcaaataaaacgaaaggctcagtcgaaagactgggcctttcgttttatctgttgtttgtcggtgaacgctctcctgagtaggacaaatggatccgaattcgagctcggcgcgcctgcaggtcgacaagcttgcggccgcataatgcttaagtcgaacagaaagtaatcgtattgtacacggccgcataatcgaaattaatacgactcactataggggaattgtgagcggataacaattccccatcttagtatattagttaagtataagaaggagatatacatatggactacaaagaccatgacggtgattataaagatcatgacatcgattacaaggatgacgatgacaagggaggaagcggatcgatggataagaaatactcaataggcttagctatcggcacaaatagcgtcggatgggcggtgatcactgatgaatataaggttccgtctaaaaagttcaaggttctgggaaatacagaccgccacagtatcaaaaaaaatcttataggggctcttttatttgacagtggagagacagcggaagcgactcgtctcaaacggacagctcgtagaaggtatacacgtcggaagaatcgtatttgttatctacaggagattttttcaaatgagatggcgaaagtagatgatagtttctttcatcgacttgaagagtcttttttggtggaagaagacaagaagcatgaacgtcatcctatttttggaaatatagtagatgaagttgcttatcatgagaaatatccaactatctatcatctgcgaaaaaaattggtagattctactgataaagcggatttgcgcttaatctatttggccttagcgcatatgattaagtttcgtggtcattttttgattgagggagatttaaatcctgataatagtgatgtggacaaactatttatccagttggtacaaacctacaatcaattatttgaagaaaaccctattaacgcaagtggagtagatgctaaagcgattctttctgcacgattgagtaaatcaagacgattagaaaatctcattgctcagctccccggtgagaagaaaaatggcttatttgggaatctcattgctttgtcattgggtttgacccctaattttaaatcaaattttgatttggcagaagatgctaaattacagctttcaaaagatacttacgatgatgatttagataatttattggcgcaaattggagatcaatatgctgatttgtttttggcagctaagaatttatcagatgctattttactttcagatatcctaagagtaaatactgaaataactaaggctcccctatcagcttcaatgattaaacgctacgatgaacatcatcaagacttgactcttttaaaagctttagttcgacaacaacttccagaaaagtataaagaaatcttttttgatcaatcaaaaaacggatatgcaggttatattgatgggggagctagccaagaagaattttataaatttatcaaaccaattttagaaaaaatggatggtactgaggaattattggtgaaactaaatcgtgaagatttgctgcgcaagcaacggacctttgacaacggctctattccccatcaaattcacttgggtgagctgcatgctattttgagaagacaagaagacttttatccatttttaaaagacaatcgtgagaagattgaaaaaatcttgacttttcgaattccttattatgttggtccattggcgcgtggcaatagtcgttttgcatggatgactcggaagtctgaagaaacaattaccccatggaattttgaagaagttgtcgataaaggtgcttcagctcaatcatttattgaacgcatgacaaactttgataaaaatcttccaaatgaaaaagtactaccaaaacatagtttgctttatgagtattttacggtttataacgaattgacaaaggtcaaatatgttactgaaggaatgcgaaaaccagcatttctttcaggtgaacagaagaaagccattgttgatttactcttcaaaacaaatcgaaaagtaaccgttaagcaattaaaagaagattatttcaaaaaaatagaatgttttgatagtgttgaaatttcaggagttgaagatagatttaatgcttcattaggtacctaccatgatttgctaaaaattattaaagataaagattttttggataatgaagaaaatgaagatatcttagaggatattgttttaacattgaccttatttgaagatagggagatgattgaggaaagacttaaaacatatgctcacctctttgatgataaggtgatgaaacagcttaaacgtcgccgttatactggttggggacgtttgtctcgaaaattgattaatggtattagggataagcaatctggcaaaacaatattagattttttgaaatcagatggttttgccaatcgcaattttatgcagctgatccatgatgatagtttgacatttaaagaagacattcaaaaagcacaagtgtctggacaaggcgatagtttacatgaacatattgcaaatttagctggtagccctgctattaaaaaaggtattttacagactgtaaaagttgttgatgaattggtcaaagtaatggggcggcataagccagaaaatatcgttattgaaatggcacgtgaaaatcagacaactcaaaagggccagaaaaattcgcgagagcgtatgaaacgaatcgaagaaggtatcaaagaattaggaagtcagattcttaaagagcatcctgttgaaaatactcaattgcaaaatgaaaagctctatctctattatctccaaaatggaagagacatgtatgtggaccaagaattagatattaatcgtttaagtgattatgatgtcgatgccattgttccacaaagtttccttaaagacgattcaatagacaataaggtcttaacgcgttctgataaaaatcgtggtaaatcggataacgttccaagtgaagaagtagtcaaaaagatgaaaaactattggagacaacttctaaacgccaagttaatcactcaacgtaagtttgataatttaacgaaagctgaacgtggaggtttgagtgaacttgataaagctggttttatcaaacgccaattggttgaaactcgccaaatcactaagcatgtggcacaaattttggatagtcgcatgaatactaaatacgatgaaaatgataaacttattcgagaggttaaagtgattaccttaaaatctaaattagtttctgacttccgaaaagatttccaattctataaagtacgtgagattaacaattaccatcatgcccatgatgcgtatctaaatgccgtcgttggaactgctttgattaagaaatatccaaaacttgaatcggagtttgtctatggtgattataaagtttatgatgttcgtaaaatgattgctaagtctgagcaagaaataggcaaagcaaccgcaaaatatttcttttactctaatatcatgaacttcttcaaaacagaaattacacttgcaaatggagagattcgcaaacgccctctaatcgaaactaatggggaaactggagaaattgtctgggataaagggcgagattttgccacagtgcgcaaagtattgtccatgccccaagtcaatattgtcaagaaaacagaagtacagacaggcggattctccaaggagtcaattttaccaaaaagaaattcggacaagcttattgctcgtaaaaaagactgggatccaaaaaaatatggtggttttgatagtccaacggtagcttattcagtcctagtggttgctaaggtggaaaaagggaaatcgaagaagttaaaatccgttaaagagttactagggatcacaattatggaaagaagttcctttgaaaaaaatccgattgactttttagaagctaaaggatataaggaagttaaaaaagacttaatcattaaactacctaaatatagtctttttgagttagaaaacggtcgtaaacggatgctggctagtgccggagaattacaaaaaggaaatgagctggctctgccaagcaaatatgtgaattttttatatttagctagtcattatgaaaagttgaagggtagtccagaagataacgaacaaaaacaattgtttgtggagcagcataagcattatttagatgagattattgagcaaatcagtgaattttctaagcgtgttattttagcagatgccaatttagataaagttcttagtgcatataacaaacatagagacaaaccaatacgtgaacaagcagaaaatattattcatttatttacgttgacgaatcttggagctcccgctgcttttaaatattttgatacaacaattgatcgtaaacgatatacgtctacaaaagaagttttagatgccactcttatccatcaatccatcactggtctttatgaaacacgcattgatttgagtcagctaggaggtgactaatagcctaggctgctgccaccgctgagcaataactagcataaccccttggggcctctaaacgggtcttgaggggttttttgctgaaacctcaggcatttgagaagcacacggtcacactgcttccggtagtcaataaaccggtaaaccagcaatagacataagcggctatttaacgaccctgccctgaaccgacgaccgggtcatcgtggccggatcttgcggcccctcggcttgaacgaattgttagacattatttgccgactaccttggtgatctcgcctttcacgtagtggacaaattcttccaactgatctgcgcgcgaggccaagcgatcttcttcttgtccaagataagcctgtctagcttcaagtatgacgggctgatactgggccggcaggcgctccattgcccagtcggcagcgacatccttcggcgcgattttgccggttactgcgctgtaccaaatgcgggacaacgtaagcactacatttcgctcatcgccagcccagtcgggcggcgagttccatagcgttaaggtttcatttagcgcctcaaatagatcctgttcaggaaccggatcaaagagttcctccgccgctggacctaccaaggcaacgctatgttctcttgcttttgtcagcaagatagccagatcaatgtcgatcgtggctggctcgaagatacctgcaagaatgtcattgcgctgccattctccaaattgcagttcgcgcttagctggataacgccacggaatgatgtcgtcgtgcacaacaatggtgacttctacagcgcggagaatctcgctctctccaggggaagccgaagtttccaaaaggtcgttgatcaaagctcgccgcgttgtttcatcaagccttacggtcaccgtaaccagcaaatcaatatcactgtgtggcttcaggccgccatccactgcggagccgtacaaatgtacggccagcaacgtcggttcgagatggcgctcgatgacgccaactacctctgatagttgagtcgatacttcggcgatcaccgcttccctcatactcttcctttttcaatattattgaagcatttatcagggttattgtctcatgagcggatacatatttgaatgtatttagaaaaataaacaaatagctagctcactcggtcgctacgctccgggcgtgagactgcggcgggcgctgcggacacatacaaagttacccacagattccgtggataagcaggggactaacatgtgaggcaaaacagcagggccgcgccggtggcgtttttccataggctccgccctcctgccagagttcacataaacagacgcttttccggtgcatctgtgggagccgtgaggctcaaccatgaatctgacagtacgggcgaaacccgacaggacttaaagatccccaccgtttccggcgggtcgctccctcttgcgctctcctgttccgaccctgccgtttaccggatacctgttccgcctttctcccttacgggaagtgtggcgctttctcatagctcacacactggtatctcggctcggtgtaggtcgttcgctccaagctgggctgtaagcaagaactccccgttcagcccgactgctgcgccttatccggtaactgttcacttgagtccaacccggaaaagcacggtaaaacgccactggcagcagccattggtaactgggagttcgcagaggatttgtttagctaaacacgcggttgctcttgaagtgtgcgccaaagtccggctacactggaaggacagatttggttgctgtgctctgcgaaagccagttaccacggttaagcagttccccaactgacttaaccttcgatcaaaccacctccccaggtggttttttcgtttacagggcaaaagattacgcgcagaaaaaaaggatctcaagaagatcctttgatcttttctactgaaccgctctagatttcagtgcaatttatctcttcaaatgtagcacctgaagtcagccccatacgatataagttgtaattctcatgttagtcatgccccgcgcccaccggaaggagctgactgggttgaaggctctcaagggcatcggtcgagatcccggtgcctaatgagtgagctaacttacattaattgcgttgcgc

SEQ ID NO: 183 - DNA, 7568 bp, synthetic construct
  source 1..7568: mol_type = other DNA
tcactgcccgctttccagtcgggaaacctgtcgtgccagctgcattaatgaatcggccaacgcgcggggagaggcggtttgcgtattgggcgccagggtggtttttcttttcaccagtgagacgggcaacagctgattgcccttcaccgcctggccctgagagagttgcagcaagcggtccacgctggtttgccccagcaggcgaaaatcctgtttgatggtggttaacggcgggatataacatgagctgtcttcggtatcgtcgtatcccactaccgagatgtccgcaccaacgcgcagcccggactcggtaatggcgcgcattgcgcccagcgccatctgatcgttggcaaccagcatcgcagtgggaacgatgccctcattcagcatttgcatggtttgttgaaaaccggacatggcactccagtcgccttcccgttccgctatcggctgaatttgattgcgagtgagatatttatgccagccagccagacgcagacgcgccgagacagaacttaatgggcccgctaacagcgcgatttgctggtgacccaatgcgaccagatgctccacgcccagtcgcgtaccgtcttcatgggagaaaataatactgttgatgggtgtctggtcagagacatcaagaaataacgccggaacattagtgcaggcagcttccacagcaatggcatcctggtcatccagcggatagttaatgatcagcccactgacgcgttgcgcgagaagattgtgcaccgccgctttacaggcttcgacgccgcttcgttctaccatcgacaccaccacgctggcacccagttgatcggcgcgagatttaatcgccgcgacaatttgcgacggcgcgtgcagggccagactggaggtggcaacgccaatcagcaacgactgtttgcccgccagttgttgtgccacgcggttgggaatgtaattcagctccgccatcgccgcttccactttttcccgcgttttcgcagaaacgtggctggcctggttcaccacgcgggaaacggtctgataagagacaccggcatactctgcgacatcgtataacgttactggtttcacattcaccaccctgaattgactctcttccgggcgctatcatgccataccgcgaaaggttttgcgccattcgatggtgtccgggagaaattaatacgactcactataggcctcgaggtcaaaagacctttttaatttctactcttgtagattccgggcaaaccatcgaagtgaccaggtcaaaagacctttttaatttctactcttgtagatgcggccgcaataactagcataaccccttggggcctctaaacgggtcttgaggggttttttgctgaagtcgacttaatacgactcactataggggaattgtgagcggataacaattcccaggtaccaaggagatataccatggactacaaagaccatgacggtgattataaagatcatgacatcgattacaaggatgacgatgacaagggaggaagcggatcgatgacacagtttgaaggcttcaccaatctctaccaggtcagcaagacgctacgttttgagcttatcccgcagggaaaaaccctgaaacacattcaggaacaggggttcatagaggaagataaggcgcgtaacgaccattataaagaactgaagcctataatcgaccgtatttataaaacgtacgcggatcagtgcctgcagctggttcagctggattgggagaatctgtccgcggctattgatagctatcgcaaagagaagaccgaggaaacccgtaacgcactgattgaagagcaggcgacctatcggaatgcgatccatgattacttcatcggccgcaccgacaacctgaccgatgcaattaacaaacgtcacgcagagatttacaaaggtctgtttaaagcagagttattcaatggcaaggttctgaaacagctgggtacggtcaccaccaccgaacacgaaaacgcactgctgaggagctttgataaatttaccacatatttcagcggtttctatgaaaatcgtaagaatgtatttagcgccgaagatatttccaccgcaattcctcatcgtattgtgcaggataattttccgaagtttaaagaaaattgtcatatttttacccgtctgatcaccgcggtaccgagcctgcgagagcattttgaaaacgttaagaaagccattggaatttttgtcagtaccagcattgaagaagtgttttcgttcccgttctataaccaactgctgacccagacccagattgatctgtacaatcagctgctggggggcataagccgcgaggcaggtaccgaaaagataaagggactcaatgaggtgctgaatctggcaattcagaagaatgatgaaacggctcatatcattgctagcctgccgcatcgtttcattcccctgtttaagcaaatcctgagcgatcgcaatacactgagctttatcctcgaagagtttaaatcggacgaagaagttatccagagcttttgcaaatacaaaaccctgctgcggaacgaaaatgtgctggagaccgctgaagcactgtttaatgaactgaactcgatcgacctcacccatatttttatatcccacaaaaaactggaaaccataagcagcgctctgtgtgaccattgggataccctgcgcaacgccctgtatgaacggcgtatcagcgagctgaccgggaaaatcaccaaatccgcaaaggaaaaagttcagcgtagtctgaaacacgaggacatcaacctgcaagaaattattagcgcagcaggtaaagagctgagcgaagcattcaaacagaaaaccagcgaaatcctgagccatgcccatgctgcactggatcagccgctgccgaccaccctgaaaaaacaggaggaaaaggagattctgaaaagccaactggacagcctgctgggcctgtatcacctgctggactggtttgcagtcgatgagagcaacgaggttgatcctgagttctccgctcgtctgaccggaatcaagctggagatggaaccgagtctgtcgttttacaataaagcgcgtaattacgcgaccaagaaaccgtatagcgtggaaaaattcaaactgaactttcagatgccgacccttgcaagcggatgggacgttaacaaagaaaaaaacaatggggcaattctgtttgtgaaaaatggcctctattatctgggtatcatgccgaaacagaaagggcgctacaaagccctgtcatttgagccgaccgagaaaacctcagagggtttcgacaagatgtactacgattatttcccggatgcggcaaaaatgatacccaaatgtagcacccaactgaaggcagttacagcccactttcagacccataccaccccgatcctgctgtcgaacaattttatagagccgctggaaattaccaaagagatttatgatctgaataatccggaaaaggagcccaagaaatttcagacggcgtatgcaaaaaagaccggggatcagaaaggttatcgtgaagcgctgtgcaaatggattgactttacccgtgactttctgtcaaaatataccaaaacgacgagcattgatctgagcagcctacgtccgagcagccaatataaggatctgggcgaatattacgccgaactgaatccgctgctctaccatatttccttccaacgaatcgctgaaaaagaaataatggacgccgttgaaaccggcaaactgtatctgtttcaaatctacaacaaagatttcgccaaaggccatcacggtaagccgaacctgcataccctgtattggaccggtctgtttagcccggagaatctggccaaaaccagcatcaagctgaacggacaggcagaactgttttaccgccccaaaagccgtatgaaaaggatggcacaccgcctgggcgaaaaaatgctgaataagaaactcaaagatcagaaaacgccgataccggataccctttatcaggagctgtatgattatgttaaccaccggctgagccatgacctgagcgacgaagcgcgtgcactgctgccgaacgtgattaccaaggaagtctcgcatgaaattattaaagatcggcgcttcaccagtgataaatttttcttccatgtaccgatcaccctgaattatcaagccgcaaatagcccttccaaatttaatcaacgcgtgaatgcgtacctgaaagagcatccggagaccccaattattggcatagcccgaggagaacgcaatctcatttatatcaccgtcattgatagcaccggtaagatcctggaacagcgtagcctgaataccattcagcagtttgactaccagaaaaagctggacaacagagaaaaggaacgtgtagccgcccggcaggcttggagtgtggtgggtactatcaaggatctgaagcaggggtatctctcccaagttatccatgaaattgtcgatctaatgattcactatcaagcagtagtggtactggaaaatctgaatttcggtttcaaaagcaaacgtacagggatcgctgaaaaagccgtttatcagcagttcgagaaaatgctgatagacaagctgaattgcctggttctgaaagattatccggcagagaaggtgggcggtgtgctgaacccgtaccagctgactgatcaatttacgagctttgcaaaaatgggaacgcagagcggtttcctgttctatgttccggcgccatataccagcaagatagacccgctgacaggtttcgtagatccgtttgtctggaaaaccattaaaaatcatgaaagtcgcaaacattttctggagggctttgattttctgcactatgacgtgaaaaccggcgacttcattctgcattttaaaatgaaccgtaatctgtcctttcagcgcggcctgcctggctttatgccggcgtgggacattgtttttgaaaagaatgagacacagtttgatgccaaaggtaccccctttattgcggggaaacgcattgtgcccgttatagaaaatcaccgcttcaccggacggtatagggacttgtacccggcaaatgaattgatagcgctgctggaggagaaaggtattgtctttcgggatggatcaaacatcctgccgaagctgctggagaacgatgacagccacgcaatagacaccatggtagcgctgatccgaagcgtgctgcagatgcgtaacagtaatgcggctacgggggaagactacattaatagcccggtccgtgatctgaacggcgtttgtttcgatagcagatttcaaaatccggagtggccgatggatgccgatgccaatggagcttaccatatcgctctcaaaggtcagctcctactgaaccatttgaaagaatcaaaagatctgaaactgcagaacggcatctcgaatcaggactggctggcctacattcaagaactgagaaactgataacctaggctgctgccaccgctgagcaataactagcataaccccttggggcctctaaacgggtcttgaggggttttttgctgaaacctcaggcatttgagaagcacacggtcacactgcttccggtagtcaataaaccggtaaaccagcaatagacataagcggctatttaacgaccctgccctgaaccgacgaccgggtcatcgtggccggatcttgcggcccctcggcttgaacgaattgttagacattatttgccgactaccttggtgatctcgcctttcacgtagtggacaaattcttccaactgatctgcgcgcgaggccaagcgatcttcttcttgtccaagataagcctgtctagcttcaagtatgacgggctgatactgggccggcaggcgctccattgcccagtcggcagcgacatccttcggcgcgattttgccggttactgcgctgtaccaaatgcgggacaacgtaagcactacatttcgctcatcgccagcccagtcgggcggcgagttccatagcgttaaggtttcatttagcgcctcaaatagatcctgttcaggaaccggatcaaagagttcctccgccgctggacctaccaaggcaacgctatgttctcttgcttttgtcagcaagatagccagatcaatgtcgatcgtggctggctcgaagatacctgcaagaatgtcattgcgctgccattctccaaattgcagttcgcgcttagctggataacgccacggaatgatgtcgtcgtgcacaacaatggtgacttctacagcgcggagaatctcgctctctccaggggaagccgaagtttccaaaaggtcgttgatcaaagctcgccgcgttgtttcatcaagccttacggtcaccgtaaccagcaaatcaatatcactgtgtggcttcaggccgccatccactgcggagccgtacaaatgtacggccagcaacgtcggttcgagatggcgctcgatgacgccaactacctctgatagttgagtcgatacttcggcgatcaccgcttccctcatactcttcctttttcaatattattgaagcatttatcagggttattgtctcatgagcggatacatatttgaatgtatttagaaaaataaacaaatagctagctcactcggtcgctacgctccgggcgtgagactgcggcgggcgctgcggacacatacaaagttacccacagattccgtggataagcaggggactaacatgtgaggcaaaacagcagggccgcgccggtggcgtttttccataggctccgccctcctgccagagttcacataaacagacgcttttccggtgcatctgtgggagccgtgaggctcaaccatgaatctgacagtacgggcgaaacccgacaggacttaaagatccccaccgtttccggcgggtcgctccctcttgcgctctcctgttccgaccctgccgtttaccggatacctgttccgcctttctcccttacgggaagtgtggcgctttctcatagctcacacactggtatctcggctcggtgtaggtcgttcgctccaagctgggctgtaagcaagaactccccgttcagcccgactgctgcgccttatccggtaactgttcacttgagtccaacccggaaaagcacggtaaaacgccactggcagcagccattggtaactgggagttcgcagaggatttgtttagctaaacacgcggttgctcttgaagtgtgcgccaaagtccggctacactggaaggacagatttggttgctgtgctctgcgaaagccagttaccacggttaagcagttccccaactgacttaaccttcgatcaaaccacctccccaggtggttttttcgtttacagggcaaaagattacgcgcagaaaaaaaggatctcaagaagatcctttgatcttttctactgaaccgctctagatttcagtgcaatttatctcttcaaatgtagcacctgaagtcagccccatacgatataagttgtaattctcatgttagtcatgccccgcgcccaccggaaggagctgactgggttgaaggctctcaagggcatcggtcgagatcccggtgcctaatgagtgagctaacttacattaattgcgttgcgc

SEQ ID NO: 184 - DNA, 5056 bp, synthetic construct
  source 1..5056: mol_type = other DNA
ttttctactgaaccgctctagatttcagtgcaatttatctcttcaaatgtagcacctgaagtcagccccatacgatataagttgtaattctcatgttagtcatgccccgcgcccaccggaaggagctgactgggttgaaggctctcaagggcatcggtcgagatcccggtgcctaatgagtgagctaacttacattaattgcgttgcgctcactgcccgctttccagtcgggaaacctgtcgtgccagctgcattaatgaatcggccaacgcgcggggagaggcggtttgcgtattgggcgccagggtggtttttcttttcaccagtgagacgggcaacagctgattgcccttcaccgcctggccctgagagagttgcagcaagcggtccacgctggtttgccccagcaggcgaaaatcctgtttgatggtggttaacggcgggatataacatgagctgtcttcggtatcgtcgtatcccactaccgagatgtccgcaccaacgcgcagcccggactcggtaatggcgcgcattgcgcccagcgccatctgatcgttggcaaccagcatcgcagtgggaacgatgccctcattcagcatttgcatggtttgttgaaaaccggacatggcactccagtcgccttcccgttccgctatcggctgaatttgattgcgagtgagatatttatgccagccagccagacgcagacgcgccgagacagaacttaatgggcccgctaacagcgcgatttgctggtgacccaatgcgaccagatgctccacgcccagtcgcgtaccgtcttcatgggagaaaataatactgttgatgggtgtctggtcagagacatcaagaaataacgccggaacattagtgcaggcagcttccacagcaatggcatcctggtcatccagcggatagttaatgatcagcccactgacgcgttgcgcgagaagattgtgcaccgccgctttacaggcttcgacgccgcttcgttctaccatcgacaccaccacgctggcacccagttgatcggcgcgagatttaatcgccgcgacaatttgcgacggcgcgtgcagggccagactggaggtggcaacgccaatcagcaacgactgtttgcccgccagttgttgtgccacgcggttgggaatgtaattcagctccgccatcgccgcttccactttttcccgcgttttcgcagaaacgtggctggcctggttcaccacgcgggaaacggtctgataagagacaccggcatactctgcgacatcgtataacgttactggtttcacattcaccaccctgaattgactctcttccgggcgctatcatgccataccgcgaaaggttttgcgccattcgatggtgtccgggagaaatttgacagctagctcagtcctaggtataatgctagccctcgagtgcggagccgttgcaacaagggcgcttgtgtgtagggaaggtcaactccccaccacttaaagcctaacggcttttgaagtgggggcttggcaagccctagttgactaccctcagccattcaatggctacgttggaagggtcatgacacttacggatgctcctccagtccgtaaccctgtcgcagatggttaaaagctctgatgggtaggagcggtgctgtctgccgaacaagcccttccaacattggggaggaggaactcactcctgaaaggaggtacacgtcttgttcgtgtacattatcaataagcatggaaaaccactcgcggccgcaataactagcataaccccttggggcctctaaacgggtcttgaggggttttttgctgaagtcgacttttacggctagctcagtcctaggtactatgctagccaggtaccaaggagatataccatggggtttgtatacattatcaataagcatggaaaaccgttaatgccgtgtagcccccgcaaagcacgtctgcttctgaaacaaaagaaagcaaaagtagttcgtcgtacaccgtttacgattcaattgctgtatggcagctccggctacaagcagccggtatcacttggcgtggatatgggcacccgccatgtcggcatttctgctactaccaagaaggatgtattgttcgaggcagaggcgcagttgcgtacggatattgtggaattgttagctatccgccgccagttccgccgctcgcgccgcaaccgcaagacccgttaccgtgaggctcgtttcttgaaccgtcgtaaacccgaagggtggttgccgccttcaatccaacataagattaattcgcatattaagctgattgatttagttcataacattttgcccgtgacgtctgttactattgaagtagccgcgttcgacacccagaaattaaaaaacttgaacattcgcggcgtcgagtaccaacagggggaacaaatgggtttttggaacgtacgcgaatacgtgttatatcgcgacaaccacacctgccagtattgtaagggtaagaaaaaagatccagtattgcaagtacaccatattgaatctcgcaagacgggtggcgactcgcccgataatttgattactttgtgcaagacgtgccatcatgagattcatgagaaaggcctggaacatatttttcaacgcaaacgcccgccaatgcgtgacgcgtctcagatgacggccatgcgttgggcgatgttttcccgcatccgtgagaagtacagccacgcgaacatcacatatggttatatcaccaaatgtattcgcatcgcgaacgggttaagcaagtcgcacatggtagacgcacgttgcatttcaggcaatcctttagcgaaaccgagtggtaccgtatatttgctgaagttcgttcgcaagaataatcgccaattacataaggcgacaattttgaaaggcggtaagcgtaaatccaacaaggctccccgcttcgtaaaggggttccagctgttcgataaagtcgtgtatgagcgtaaagagtgttttattttcgggcgtcgttcttccggctacttcgatttacgtctgcttgacgggactaaagtccacgcttcggccagctggaaaaaattaaaacgtgttgaacacgcaagtacattactgattgaacgccgtaagggggatagttcgccaaccttcgcattagcgtgataacctaggctgctgccaccgctgagcaataactagcataaccccttggggcctctaaacgggtcttgaggggttttttgctgaaacctcaggcatttgagaagcacacggtcacactgcttccggtagtcaataaaccggtaaaccagcaatagacataagcggctatttaacgaccctgccctgaaccgacgaccgggtcatcgtggccggatcttgcggcccctcggcttgaacgaattgttagacattatttgccgactaccttggtgatctcgcctttcacgtagtggacaaattcttccaactgatctgcgcgcgaggccaagcgatcttcttcttgtccaagataagcctgtctagcttcaagtatgacgggctgatactgggccggcaggcgctccattgcccagtcggcagcgacatccttcggcgcgattttgccggttactgcgctgtaccaaatgcgggacaacgtaagcactacatttcgctcatcgccagcccagtcgggcggcgagttccatagcgttaaggtttcatttagcgcctcaaatagatcctgttcaggaaccggatcaaagagttcctccgccgctggacctaccaaggcaacgctatgttctcttgcttttgtcagcaagatagccagatcaatgtcgatcgtggctggctcgaagatacctgcaagaatgtcattgcgctgccattctccaaattgcagttcgcgcttagctggataacgccacggaatgatgtcgtcgtgcacaacaatggtgacttctacagcgcggagaatctcgctctctccaggggaagccgaagtttccaaaaggtcgttgatcaaagctcgccgcgttgtttcatcaagccttacggtcaccgtaaccagcaaatcaatatcactgtgtggcttcaggccgccatccactgcggagccgtacaaatgtacggccagcaacgtcggttcgagatggcgctcgatgacgccaactacctctgatagttgagtcgatacttcggcgatcaccgcttccctcatactcttcctttttcaatattattgaagcatttatcagggttattgtctcatgagcggatacatatttgaatgtatttagaaaaataaacaaatagctagctcactcggtcgctacgctccgggcgtgagactgcggcgggcgctgcggacacatacaaagttacccacagattccgtggataagcaggggactaacatgtgaggcaaaacagcagggccgcgccggtggcgtttttccataggctccgccctcctgccagagttcacataaacagacgcttttccggtgcatctgtgggagccgtgaggctcaaccatgaatctgacagtacgggcgaaacccgacaggacttaaagatccccaccgtttccggcgggtcgctccctcttgcgctctcctgttccgaccctgccgtttaccggatacctgttccgcctttctcccttacgggaagtgtggcgctttctcatagctcacacactggtatctcggctcggtgtaggtcgttcgctccaagctgggctgtaagcaagaactccccgttcagcccgactgctgcgccttatccggtaactgttcacttgagtccaacccggaaaagcacggtaaaacgccactggcagcagccattggtaactgggagttcgcagaggatttgtttagctaaacacgcggttgctcttgaagtgtgcgccaaagtccggctacactggaaggacagatttggttgctgtgctctgcgaaagccagttaccacggttaagcagttccccaactgacttaaccttcgatcaaaccacctccccaggtggttttttcgtttacagggcaaaagattacgcgcagaaaaaaaggatctcaagaagatcctttgatc

SEQ ID NO: 185 - DNA, 5207 bp, synthetic construct
  source 1..5207: mol_type = other DNA
accaaaatcccttaacgtgagttttcgttccactgagcgtcagaccccgtagaaaagatcaaaggatcttcttgagatcctttttttctgcgcgtaatctgctgcttgcaaacaaaaaaaccaccgctaccagcggtggtttgtttgccggatcaagagctaccaactctttttccgaaggtaactggcttcagcagagcgcagataccaaatactgtccttctagtgtagccgtagttaggccaccacttcaagaactctgtagcaccgcctacatacctcgctctgctaatcctgttaccagtggctgctgccagtggcgataagtcgtgtcttaccgggttggactcaagacgatagttaccggataaggcgcagcggtcgggctgaacggggggttcgtgcacacagcccagcttggagcgaacgacctacaccgaactgagatacctacagcgtgagctatgagaaagcgccacgcttcccgaagggagaaaggcggacaggtatccggtaagcggcagggtcggaacaggagagcgcacgagggagcttccagggggaaacgcctggtatctttatagtcctgtcgggtttcgccacctctgacttgagcgtcgatttttgtgatgctcgtcaggggggcggagcctatggaaaaacgccagcaacgcggcctttttacggttcctggccttttgctggccttttgctcacatgttctttcctgcgttatcccctgattctgtggataaccgtattaccgcctttgagtgagctgataccgctcgccgcagccgaacgaccgagcgcagcgagtcagtgagcgaggaagcggaagagcgcctgatgcggtattttctccttacgcatctgtgcggtatttcacaccgcatatatggtgcactctcagtacaatctgctctgatgccgcatagttaagccagtatacactccgctatcgctacgtgactgggtcatggctgcgccccgacacccgccaacacccgctgacgcgccctgacgggcttgtctgctcccggcatccgcttacagacaagctgtgaccgtctccgggagctgcatgtgtcagaggttttcaccgtcatcaccgaaacgcgcgaggcagctgcggtaaagctcatcagcgtggtcgtgaagcgattcacagatgtctgcctgttcatccgcgtccagctcgttgagtttctccagaagcgttaatgtctggcttctgataaagcgggccatgttaagggcggttttttcctgtttggtcactgatgcctccgtgtaagggggatttctgttcatgggggtaatgataccgatgaaacgagagaggatgctcacgatacgggttactgatgatgaacatgcccggttactggaacgttgtgagggtaaacaactggcggtatggatgcggcgggaccagagaaaaatcactcagggtcaatgccagcgcttcgttaatacagatgtaggtgttccacagggtagccagcagcatcctgcgatgcagatccggaacataatggtgcagggcgctgacttccgcgtttccagactttacgaaacacggaaaccgaagaccattcatgttgttgctcaggtcgcagacgttttgcagcagcagtcgcttcacgttcgctcgcgtatcggtgattcattctgctaaccagtaaggcaaccccgccagcctagccgggtcctcaacgacaggagcacgatcatgctagtcatgccccgcgcccaccggaaggagctgactgggttgaaggctctcaagggcatcggtcgagatccctcactgcccgctttccagtcgggaaacctgtcgtgccagctgcattaatgaatcggccaacgcgcggggagaggcggtttgcgtattgggcgccagggtggtttttcttttcaccagtgagacgggcaacagctgattgcccttcaccgcctggccctgagagagttgcagcaagcggtccacgctggtttgccccagcaggcgaaaatcctgtttgatggtggttaacggcgggatataacatgagctgtcttcggtatcgtcgtatcccactaccgagatgtccgcaccaacgcgcagcccggactcggtaatggcgcgcattgcgcccagcgccatctgatcgttggcaaccagcatcgcagtgggaacgatgccctcattcagcatttgcatggtttgttgaaaaccggacatggcactccagtcgccttcccgttccgctatcggctgaatttgattgcgagtgagatatttatgccagccagccagacgcagacgcgccgagacagaacttaatgggcccgctaacagcgcgatttgctggtgacccaatgcgaccagatgctccacgcccagtcgcgtaccgtcttcatgggagaaaataatactgttgatgggtgtctggtcagagacatcaagaaataacgccggaacattagtgcaggcagcttccacagcaatggcatcctggtcatccagcggatagttaatgatcagcccactgacgcgttgcgcgagaagattgtgcaccgccgctttacaggcttcgacgccgcttcgttctaccatcgacaccaccacgctggcacccagttgatcggcgcgagatttaatcgccgcgacaatttgcgacggcgcgtgcagggccagactggaggtggcaacgccaatcagcaacgactgtttgcccgccagttgttgtgccacgcggttgggaatgtaattcagctccgccatcgccgcttccactttttcccgcgttttcgcagaaacgtggctggcctggttcaccacgcgggaaacggtctgataagagacaccggcatactctgcgacatcgtataacgttactggtttcacattcaccaccctgaattgactctcttccgggcgctatcatgccataccgcgaaaggttttgcgccattcgatggtgtctaatgtgagttagctcactcattaggcaccccaggctttacactttatgcttccggctcgtatgttgtgtggaattgtgagcggataacaatttcacggcgcgccgacttcgagcgaaggagacttcgaatgaagttggataataacaaccatagcgtcttccttctgtactatcatttggtattagttgtcaagtatcgtcgccaggtgattgatgacacaatctcggattacgcgaaggatatgtttgtccgtttaggtaagaattacaacattagcctggtagagtggaatcatgacatggaccatgttcacatcttattcaaagctcaccccaactcggaattgtcgaagttcattaatgcgtacaagtctgcttcaagtcgccttattaagaagcattttcctcaagtaaagcgcaaattgtggaaggagtacttttggtcccgctcattttgcctgcttacaacaggaggagcgcctatcgaggtcatcaaaaaatacatcgaaaatcaggggatgaaatgataacctaggcttgctgcctgcgctgagcaataactagcataaccccttggggcctctaaacgggtcttgaggggttttttgcatcgcccttcccaacagttgcgcagcctgaatggcgaatggcgcctgatgcgcccggacaccatcgaatggcgcaaccggattggcgaatgggacgcgccctgtagcggcgcattaagcgcggcgggtgtggtggttacgcgcagcgtgaccgctacacttgccagcgccctagcgcccgctcctttcgctttcttcccttcctttctcgccacgttcgccggctttccccgtcaagctctaaatcgggggctccctttagggttccgatttagtgctttacggcacctcgaccccaaaaaacttgattagggtgatggttcacgtagtgggccatcgccctgatagacggtttttcgccctttgacgttggagtccacgttctttaatagtggactcttgttccaaactggaacaacactcaaccctatctcggtctattcttttgatttataagggattttgccgatttcggcctattggttaaaaaatgagctgatttaacaaaaatttaacgcgaattttaacaaaatattaacgtttacaatttctggcggcacgatggcatgagattatcaaaaaggatcttcacctagatccttttaaattaaaaatgaagttttaaatcaatctaaagtatatatgagtaaacttggtctgacagttaccaatgcttaatcagtgaggcacctatctcagcgatctgtctatttcgttcatccatagttgcctgactccccgtcgtgtagataactacgatacgggagggcttaccatctggccccagtgctgcaatgataccgcgagacccacgctcaccggctccagatttatcagcaataaaccagccagccggaagggccgagcgcagaagtggtcctgcaactttatccgcctccatccagtctattaattgttgccgggaagctagagtaagtagttcgccagttaatagtttgcgcaacgttgttgccattgctacaggcatcgtggtgtcacgctcgtcgtttggtatggcttcattcagctccggttcccaacgatcaaggcgagttacatgatcccccatgttgtgcaaaaaagcggttagctccttcggtcctccgatcgttgtcagaagtaagttggccgcagtgttatcactcatggttatggcagcactgcataattctcttactgtcatgccatccgtaagatgcttttctgtgactggtgagtactcaaccaagtcattctgagaatagtgtatgcggcgaccgagttgctcttgcccggcgtcaatacgggataataccgcgccacatagcagaactttaaaagtgctcatcattggaaaacgttcttcggggcgaaaactctcaaggatcttaccgctgttgagatccagttcgatgtaacccactcgtgcacccaactgatcttcagcatcttttactttcaccagcgtttctgggtgagcaaaaacaggaaggcaaaatgccgcaaaaaagggaataagggcgacacggaaatgttgaatactcatactcttcctttttcaatcatgattgaagcatttatcagggttattgtctcatgagcggatacatatttgaatgtatttagaaaaataaacaaataggtcatg

SEQ ID NO: 186 - DNA, 5207 bp, synthetic construct
  source 1..5207: mol_type = other DNA
accaaaatcccttaacgtgagttttcgttccactgagcgtcagaccccgtagaaaagatcaaaggatcttcttgagatcctttttttctgcgcgtaatctgctgcttgcaaacaaaaaaaccaccgctaccagcggtggtttgtttgccggatcaagagctaccaactctttttccgaaggtaactggcttcagcagagcgcagataccaaatactgtccttctagtgtagccgtagttaggccaccacttcaagaactctgtagcaccgcctacatacctcgctctgctaatcctgttaccagtggctgctgccagtggcgataagtcgtgtcttaccgggttggactcaagacgatagttaccggataaggcgcagcggtcgggctgaacggggggttcgtgcacacagcccagcttggagcgaacgacctacaccgaactgagatacctacagcgtgagctatgagaaagcgccacgcttcccgaagggagaaaggcggacaggtatccggtaagcggcagggtcggaacaggagagcgcacgagggagcttccagggggaaacgcctggtatctttatagtcctgtcgggtttcgccacctctgacttgagcgtcgatttttgtgatgctcgtcaggggggcggagcctatggaaaaacgccagcaacgcggcctttttacggttcctggccttttgctggccttttgctcacatgttctttcctgcgttatcccctgattctgtggataaccgtattaccgcctttgagtgagctgataccgctcgccgcagccgaacgaccgagcgcagcgagtcagtgagcgaggaagcggaagagcgcctgatgcggtattttctccttacgcatctgtgcggtatttcacaccgcatatatggtgcactctcagtacaatctgctctgatgccgcatagttaagccagtatacactccgctatcgctacgtgactgggtcatggctgcgccccgacacccgccaacacccgctgacgcgccctgacgggcttgtctgctcccggcatccgcttacagacaagctgtgaccgtctccgggagctgcatgtgtcagaggttttcaccgtcatcaccgaaacgcgcgaggcagctgcggtaaagctcatcagcgtggtcgtgaagcgattcacagatgtctgcctgttcatccgcgtccagctcgttgagtttctccagaagcgttaatgtctggcttctgataaagcgggccatgttaagggcggttttttcctgtttggtcactgatgcctccgtgtaagggggatttctgttcatgggggtaatgataccgatgaaacgagagaggatgctcacgatacgggttactgatgatgaacatgcccggttactggaacgttgtgagggtaaacaactggcggtatggatgcggcgggaccagagaaaaatcactcagggtcaatgccagcgcttcgttaatacagatgtaggtgttccacagggtagccagcagcatcctgcgatgcagatccggaacataatggtgcagggcgctgacttccgcgtttccagactttacgaaacacggaaaccgaagaccattcatgttgttgctcaggtcgcagacgttttgcagcagcagtcgcttcacgttcgctcgcgtatcggtgattcattctgctaaccagtaaggcaaccccgccagcctagccgggtcctcaacgacaggagcacgatcatgctagtcatgccccgcgcccaccggaaggagctgactgggttgaaggctctcaagggcatcggtcgagatccctcactgcccgctttccagtcgggaaacctgtcgtgccagctgcattaatgaatcggccaacgcgcggggagaggcggtttgcgtattgggcgccagggtggtttttcttttcaccagtgagacgggcaacagctgattgcccttcaccgcctggccctgagagagttgcagcaagcggtccacgctggtttgccccagcaggcgaaaatcctgtttgatggtggttaacggcgggatataacatgagctgtcttcggtatcgtcgtatcccactaccgagatgtccgcaccaacgcgcagcccggactcggtaatggcgcgcattgcgcccagcgccatctgatcgttggcaaccagcatcgcagtgggaacgatgccctcattcagcatttgcatggtttgttgaaaaccggacatggcactccagtcgccttcccgttccgctatcggctgaatttgattgcgagtgagatatttatgccagccagccagacgcagacgcgccgagacagaacttaatgggcccgctaacagcgcgatttgctggtgacccaatgcgaccagatgctccacgcccagtcgcgtaccgtcttcatgggagaaaataatactgttgatgggtgtctggtcagagacatcaagaaataacgccggaacattagtgcaggcagcttccacagcaatggcatcctggtcatccagcggatagttaatgatcagcccactgacgcgttgcgcgagaagattgtgcaccgccgctttacaggcttcgacgccgcttcgttctaccatcgacaccaccacgctggcacccagttgatcggcgcgagatttaatcgccgcgacaatttgcgacggcgcgtgcagggccagactggaggtggcaacgccaatcagcaacgactgtttgcccgccagttgttgtgccacgcggttgggaatgtaattcagctccgccatcgccgcttccactttttcccgcgttttcgcagaaacgtggctggcctggttcaccacgcgggaaacggtctgataagagacaccggcatactctgcgacatcgtataacgttactggtttcacattcaccaccctgaattgactctcttccgggcgctatcatgccataccgcgaaaggttttgcgccattcgatggtgtctaatgtgagttagctcactcattaggcaccccaggctttacactttatgcttccggctcgtatgttgtgtggaattgtgagcggataacaatttcacggcgcgccgacttcgagcgaaggagacttcgaatgaagttggataataacaaccatagcgtcttccttctgtactatcatttggtattagttgtcaagtatcgtcgccaggtgattgatgacacaatctcggattacgcgaaggatatgtttgtccgtttaggtaagaattacaacattagcctggtagagtggaatcatgacatggaccatgttcacatcttattcaaagctcaccccaactcggaattgtcgaagttcattaatgcgtacaagtctgcttcaagtcgccttattaagaagcattttcctcaagtaaagcgcaaattgtggaaggagtacttttggtcccgctcattttgcctgcttacaacaggaggagcgcctatcgaggtcatcaaaaaagccatcgaaaatcaggggatgaaatgataacctaggcttgctgcctgcgctgagcaataactagcataaccccttggggcctctaaacgggtcttgaggggttttttgcatcgcccttcccaacagttgcgcagcctgaatggcgaatggcgcctgatgcgcccggacaccatcgaatggcgcaaccggattggcgaatgggacgcgccctgtagcggcgcattaagcgcggcgggtgtggtggttacgcgcagcgtgaccgctacacttgccagcgccctagcgcccgctcctttcgctttcttcccttcctttctcgccacgttcgccggctttccccgtcaagctctaaatcgggggctccctttagggttccgatttagtgctttacggcacctcgaccccaaaaaacttgattagggtgatggttcacgtagtgggccatcgccctgatagacggtttttcgccctttgacgttggagtccacgttctttaatagtggactcttgttccaaactggaacaacactcaaccctatctcggtctattcttttgatttataagggattttgccgatttcggcctattggttaaaaaatgagctgatttaacaaaaatttaacgcgaattttaacaaaatattaacgtttacaatttctggcggcacgatggcatgagattatcaaaaaggatcttcacctagatccttttaaattaaaaatgaagttttaaatcaatctaaagtatatatgagtaaacttggtctgacagttaccaatgcttaatcagtgaggcacctatctcagcgatctgtctatttcgttcatccatagttgcctgactccccgtcgtgtagataactacgatacgggagggcttaccatctggccccagtgctgcaatgataccgcgagacccacgctcaccggctccagatttatcagcaataaaccagccagccggaagggccgagcgcagaagtggtcctgcaactttatccgcctccatccagtctattaattgttgccgggaagctagagtaagtagttcgccagttaatagtttgcgcaacgttgttgccattgctacaggcatcgtggtgtcacgctcgtcgtttggtatggcttcattcagctccggttcccaacgatcaaggcgagttacatgatcccccatgttgtgcaaaaaagcggttagctccttcggtcctccgatcgttgtcagaagtaagttggccgcagtgttatcactcatggttatggcagcactgcataattctcttactgtcatgccatccgtaagatgcttttctgtgactggtgagtactcaaccaagtcattctgagaatagtgtatgcggcgaccgagttgctcttgcccggcgtcaatacgggataataccgcgccacatagcagaactttaaaagtgctcatcattggaaaacgttcttcggggcgaaaactctcaaggatcttaccgctgttgagatccagttcgatgtaacccactcgtgcacccaactgatcttcagcatcttttactttcaccagcgtttctgggtgagcaaaaacaggaaggcaaaatgccgcaaaaaagggaataagggcgacacggaaatgttgaatactcatactcttcctttttcaatcatgattgaagcatttatcagggttattgtctcatgagcggatacatatttgaatgtatttagaaaaataaacaaataggtcatg

SEQ ID NO: 187 - DNA, 5004 bp, synthetic construct
  source 1..5004: mol_type = other DNA
caccgtaaccagcaaatcaatatcactgtgtggcttcaggccgccatccactgcggagccgtacaaatgtacggccagcaacgtcggttcgagatggcgctcgatgacgccaactacctctgatagttgagtcgatacttcggcgatcaccgcttccctcatactcttcctttttcaatattattgaagcatttatcagggttattgtctcatgagcggatacatatttgaatgtatttagaaaaataaacaaatagctagctcactcggtcgctacgctccgggcgtgagactgcggcgggcgctgcggacacatacaaagttacccacagattccgtggataagcaggggactaacatgtgaggcaaaacagcagggccgcgccggtggcgtttttccataggctccgccctcctgccagagttcacataaacagacgcttttccggtgcatctgtgggagccgtgaggctcaaccatgaatctgacagtacgggcgaaacccgacaggacttaaagatccccaccgtttccggcgggtcgctccctcttgcgctctcctgttccgaccctgccgtttaccggatacctgttccgcctttctcccttacgggaagtgtggcgctttctcatagctcacacactggtatctcggctcggtgtaggtcgttcgctccaagctgggctgtaagcaagaactccccgttcagcccgactgctgcgccttatccggtaactgttcacttgagtccaacccggaaaagcacggtaaaacgccactggcagcagccattggtaactgggagttcgcagaggatttgtttagctaaacacgcggttgctcttgaagtgtgcgccaaagtccggctacactggaaggacagatttggttgctgtgctctgcgaaagccagttaccacggttaagcagttccccaactgacttaaccttcgatcaaaccacctccccaggtggttttttcgtttacagggcaaaagattacgcgcagaaaaaaaggatctcaagaagatcctttgatcttttctactgaaccgctctagatttcagtgcaatttatctcttcaaatgtagcacctgaagtcagccccatacgatataagttgtaattctcatgttagtcatgccccgcgcccaccggaaggagctgactgggttgaaggctctcaagggcatcggtcgagatcccggtgcctaatgagtgagctaacttacattaattgcgttgcgctcactgcccgctttccagtcgggaaacctgtcgtgccagctgcattaatgaatcggccaacgcgcggggagaggcggtttgcgtattgggcgccagggtggtttttcttttcaccagtgagacgggcaacagctgattgcccttcaccgcctggccctgagagagttgcagcaagcggtccacgctggtttgccccagcaggcgaaaatcctgtttgatggtggttaacggcgggatataacatgagctgtcttcggtatcgtcgtatcccactaccgagatgtccgcaccaacgcgcagcccggactcggtaatggcgcgcattgcgcccagcgccatctgatcgttggcaaccagcatcgcagtgggaacgatgccctcattcagcatttgcatggtttgttgaaaaccggacatggcactccagtcgccttcccgttccgctatcggctgaatttgattgcgagtgagatatttatgccagccagccagacgcagacgcgccgagacagaacttaatgggcccgctaacagcgcgatttgctggtgacccaatgcgaccagatgctccacgcccagtcgcgtaccgtcttcatgggagaaaataatactgttgatgggtgtctggtcagagacatcaagaaataacgccggaacattagtgcaggcagcttccacagcaatggcatcctggtcatccagcggatagttaatgatcagcccactgacgcgttgcgcgagaagattgtgcaccgccgctttacaggcttcgacgccgcttcgttctaccatcgacaccaccacgctggcacccagttgatcggcgcgagatttaatcgccgcgacaatttgcgacggcgcgtgcagggccagactggaggtggcaacgccaatcagcaacgactgtttgcccgccagttgttgtgccacgcggttgggaatgtaattcagctccgccatcgccgcttccactttttcccgcgttttcgcagaaacgtggctggcctggttcaccacgcgggaaacggtctgataagagacaccggcatactctgcgacatcgtataacgttactggtttcacattcaccaccctgaattgactctcttccgggcgctatcatgccataccgcgaaaggttttgcgccattcgatggtgtccgggattgacagctagctcagtcctaggtataatgctagcgtggagatatacctcgagttaagcgcggcttgtatcgaacaaagtctggcaaactaattaatgctgatgtcaatggcgcattaaacatcttaaagaaaagtaaagctgtagacctgagtgtcttatgctctagcggcgaagtggacacgcctcaaagaataaggattgcttgaagcagtcaaacttctttggaagcccccacttcaaattttcgctagaaaattaagtgggggtagttcacggacaagtggttcaccatgcgttgctttatggtatgatagctcgcggccgcaataactagcataaccccttggggcctctaaacgggtcttgaggggttttttgctgaagtcgacttttacggctagctcagtcctaggtactatgctagcgtggagatatacggtaccaaggagatataccatgggctatttttgcatcaagcagcagcttaatgggttgacgaaggaagagtacctgacactgcgtgagttgtgccatattgccaaaaacatgtacaacgttggcctttacaacgtacgtcagtactattttgagcataaggagttcttaaattacgaaaagaactatcacttggcgaagactaatgaaaactacaagttactgaactcgaacatggctcaacaaatcttgaaaaaagtaaatgaagccttcaaaagtttcttcggtcttatttcgcttgccaaacaaggtaaatacgaccataaagcaatctcgattcccaaatacttaaagaaagacggtttccattcgttaatcatcggccaaatccgcattgacggaaataagttcacgattccatactctcgcttattcaaaaagacacataagcccattacaatcactattccaccagtgttacttgataaaaagattaagcagatcgaaatcattccgaaacaccatgcacgtttcttcgagatccagtacaagtacgaaatgcctgaagatcagcgcgaacttaatgatcagaaggcgcttgcgattgccttggggcttaataacttggctacatgtgtaacctcagacggacgttctttcattattgacggccgtcgtcttaaatctatcaaccaatggttcaataaggaaaacgctcgcttgcagtctattaaagataaacagaagattaagggaaccacgcgtaaacaagcactgcttgcgatgaatcgtaataacaaggtgaacgactatatcaataagacctgccgctatatcattaactactgtatcgaaaatcaaattggcaagctggtaatcgggtacgccgaaacatggcagcgcaacatgaatttgggcaagaaaaccaaccaaaacttcgtcaatatccctcttggaaacattaaggagaagttagaatacctttgtgagttctatgggatcgagtttttgaagcaagaagagtcgtatacaagtcaagcgtcgttttttgatggagatgaaatccccgaatacaacgcggataatcccaaagagtacaaattttctggtaagcgcattaagcgcggcctgtatcgcactaaatcaggaaaacttattaacgcagacgtgaatggggcattgaatattttaaaaaaaagcaaggctgttgatttgtctgtcttgtgcagttctggtgaggtagacaccccgcaacgtattcgcatcgcgtgataacctaggctgctgccaccgctgagcaataactagcataaccccttggggcctctaaacgggtcttgaggggttttttgctgaaacctcaggcatttgagaagcacacggtcacactgcttccggtagtcaataaaccggtaaaccagcaatagacataagcggctatttaacgaccctgccctgaaccgacgaccgggtcatcgtggccggatcttgcggcccctcggcttgaacgaattgttagacattatttgccgactaccttggtgatctcgcctttcacgtagtggacaaattcttccaactgatctgcgcgcgaggccaagcgatcttcttcttgtccaagataagcctgtctagcttcaagtatgacgggctgatactgggccggcaggcgctccattgcccagtcggcagcgacatccttcggcgcgattttgccggttactgcgctgtaccaaatgcgggacaacgtaagcactacatttcgctcatcgccagcccagtcgggcggcgagttccatagcgttaaggtttcatttagcgcctcaaatagatcctgttcaggaaccggatcaaagagttcctccgccgctggacctaccaaggcaacgctatgttctcttgcttttgtcagcaagatagccagatcaatgtcgatcgtggctggctcgaagatacctgcaagaatgtcattgcgctgccattctccaaattgcagttcgcgcttagctggataacgccacggaatgatgtcgtcgtgcacaacaatggtgacttctacagcgcggagaatctcgctctctccaggggaagccgaagtttccaaaaggtcgttgatcaaagctcgccgcgttgtttcatcaagccttacggt

SEQ ID NO: 188 - DNA, 5484 bp, synthetic construct
  source 1..5484: mol_type = other DNA
agtcagccccatacgatataagttgtaattctcatgttagtcatgccccgcgcccaccggaaggagctgactgggttgaaggctctcaagggcatcggtcgagatcccggtgcctaatgagtgagctaacttacattaattgcgttgcgctcactgcccgctttccagtcgggaaacctgtcgtgccagctgcattaatgaatcggccaacgcgcggggagaggcggtttgcgtattgggcgccagggtggtttttcttttcaccagtgagacgggcaacagctgattgcccttcaccgcctggccctgagagagttgcagcaagcggtccacgctggtttgccccagcaggcgaaaatcctgtttgatggtggttaacggcgggatataacatgagctgtcttcggtatcgtcgtatcccactaccgagatgtccgcaccaacgcgcagcccggactcggtaatggcgcgcattgcgcccagcgccatctgatcgttggcaaccagcatcgcagtgggaacgatgccctcattcagcatttgcatggtttgttgaaaaccggacatggcactccagtcgccttcccgttccgctatcggctgaatttgattgcgagtgagatatttatgccagccagccagacgcagacgcgccgagacagaacttaatgggcccgctaacagcgcgatttgctggtgacccaatgcgaccagatgctccacgcccagtcgcgtaccgtcttcatgggagaaaataatactgttgatgggtgtctggtcagagacatcaagaaataacgccggaacattagtgcaggcagcttccacagcaatggcatcctggtcatccagcggatagttaatgatcagcccactgacgcgttgcgcgagaagattgtgcaccgccgctttacaggcttcgacgccgcttcgttctaccatcgacaccaccacgctggcacccagttgatcggcgcgagatttaatcgccgcgacaatttgcgacggcgcgtgcagggccagactggaggtggcaacgccaatcagcaacgactgtttgcccgccagttgttgtgccacgcggttgggaatgtaattcagctccgccatcgccgcttccactttttcccgcgttttcgcagaaacgtggctggcctggttcaccacgcgggaaacggtctgataagagacaccggcatactctgcgacatcgtataacgttactggtttcacattcaccaccctgaattgactctcttccgggcgctatcatgccataccgcgaaaggttttgcgccattcgatggtgtccgggagaaattaatacgactcactataggcctcgagttaactaaagggaattttcccttgagtaaatattttatagaatcaacttacaaggataaaagtggtaaagaaaacaaatgctatttgctaactaagatgggtaattaaactgttataacaaatctaaacaaaactatacaaatatgtatagaaaaatagatttataacaggaagccctgtgtatcatgtgaatggtgcatactcggtgttaattgcttttaactcctaaagccttacaaccaaagcgaagttggaaacgacaagcgtaacggtgcgaaagctgaaaaaatagtaaggatggcataagctgaaataaaatccaattaggttctataaaagggtggtcgtgacatatagaaaacgttgggtgctaaatgctgtaataatggatgtttagcagggaaattcctaagtcttttaagatatggaagaccttcaacgactatctccttgagggagagtaaagccacaagccaacggtggaagaaaaataccgcatctcttttgagatgaagatatagtctacgctcatatgaaagtatgagaggtctactcgtgagagaaagactgctataggtgttgcgacctatagtgaataagaaaaatatatacaaatataaaaaatattgacatatctctctaaaaagtgtaatatattattatactaaagggaggtgagtacatgatagtagcaattaaaataaaattaaagccaactaaagaacaagaggttttattttggaagtcagcaggagttgcaaggtggtcttataactattttttatcagaaagtgaaagacactaccaagagtatcttgaaggtaaacaagacaagaaaaccataaaagaaagcgaagtcagaaaatatattaataatgtattaaaaaagactactcatacatggcttgaagaagttggaagcaatgtaatgaaacaagcagtaaaagatgctgacatagctagaaaaagatggtttgatggtgttgcaaacaagccgaaattcaaaagtaagcgaaaaagtaaagttagtttttatgtgaattatgaaagtctaaagcgaacaaataatggctttagaggtgaaaaaatcggtgtagtaaaaacatatcaagcattaccaaagttaaagaaaggtgaaaaatattcaaatccacgaatatcatttgatggtatgaattggtttatatctataggatataacaatgaatttaaagctgtcaaattaactgatgttagtttaggaattgacgttggtataaaagaattagctgtgtgttcagacggtcaatttaagaaaaatataaataaaactaaaagagttagattccttgaaaagaaattgaaacgtgaacagcgaaagataagtcataaactcgaagctaatattaaaagttatgataagaatagaaaaccgatttataaaagacctttaagagatatgaaaaatatccaaaaacaaaacagaataattcgtaatttatataaaaaacttgaaaatattcgcacaaattatttgcatcaatgttccaatgagatagtgaaaaccaagccttctcgaattgttatggaaacattgaatataaaaggtatgatgaagaataagcatttatctaaagctatagctaatcaaaagttatatgaatttaaaagacaaattcaatacaaatgtaagaagtatggaattaaatttgttgaagctgataaatggtatccatcatcaaaaacttgtagttgttgtggtcaagttaaatcagatttaaagcttaaagacagattatatgtctgtaattgtggcttaaagatggatagagatttgaacgcaagtattaatttagcaaattaccaaattcaaagtgcttaacctaaactaagctttgaatatgtacgtaacgatactacggaatttaagcctgttaagagtcatatcaaatggtagtagctttggcaaacccagattcgttgaagcaggaagacacaagacgaaaatcataagacataagtcgtgtcatagtataaatgtctacatttaaatagaaatgtatatatttttcgtatcggttgtgaatttttagccaataaatttaatggtgaaaaagggatactatttactgctaaatatgttgaaagatttaatgaaatggaagagaaacagaatcaagcgcctaggctgctgccaccgctgagcaataactagcataaccccttggggcctctaaacgggtcttgaggggttttttgctgaaacctcaggcatttgagaagcacacggtcacactgcttccggtagtcaataaaccggtaaaccagcaatagacataagcggctatttaacgaccctgccctgaaccgacgaccgggtcatcgtggccggatcttgcggcccctcggcttgaacgaattgttagacattatttgccgactaccttggtgatctcgcctttcacgtagtggacaaattcttccaactgatctgcgcgcgaggccaagcgatcttcttcttgtccaagataagcctgtctagcttcaagtatgacgggctgatactgggccggcaggcgctccattgcccagtcggcagcgacatccttcggcgcgattttgccggttactgcgctgtaccaaatgcgggacaacgtaagcactacatttcgctcatcgccagcccagtcgggcggcgagttccatagcgttaaggtttcatttagcgcctcaaatagatcctgttcaggaaccggatcaaagagttcctccgccgctggacctaccaaggcaacgctatgttctcttgcttttgtcagcaagatagccagatcaatgtcgatcgtggctggctcgaagatacctgcaagaatgtcattgcgctgccattctccaaattgcagttcgcgcttagctggataacgccacggaatgatgtcgtcgtgcacaacaatggtgacttctacagcgcggagaatctcgctctctccaggggaagccgaagtttccaaaaggtcgttgatcaaagctcgccgcgttgtttcatcaagccttacggtcaccgtaaccagcaaatcaatatcactgtgtggcttcaggccgccatccactgcggagccgtacaaatgtacggccagcaacgtcggttcgagatggcgctcgatgacgccaactacctctgatagttgagtcgatacttcggcgatcaccgcttccctcatactcttcctttttcaatattattgaagcatttatcagggttattgtctcatgagcggatacatatttgaatgtatttagaaaaataaacaaatagctagctcactcggtcgctacgctccgggcgtgagactgcggcgggcgctgcggacacatacaaagttacccacagattccgtggataagcaggggactaacatgtgaggcaaaacagcagggccgcgccggtggcgtttttccataggctccgccctcctgccagagttcacataaacagacgcttttccggtgcatctgtgggagccgtgaggctcaaccatgaatctgacagtacgggcgaaacccgacaggacttaaagatccccaccgtttccggcgggtcgctccctcttgcgctctcctgttccgaccctgccgtttaccggatacctgttccgcctttctcccttacgggaagtgtggcgctttctcatagctcacacactggtatctcggctcggtgtaggtcgttcgctccaagctgggctgtaagcaagaactccccgttcagcccgactgctgcgccttatccggtaactgttcacttgagtccaacccggaaaagcacggtaaaacgccactggcagcagccattggtaactgggagttcgcagaggatttgtttagctaaacacgcggttgctcttgaagtgtgcgccaaagtccggctacactggaaggacagatttggttgctgtgctctgcgaaagccagttaccacggttaagcagttccccaactgacttaaccttcgatcaaaccacctccccaggtggttttttcgtttacagggcaaaagattacgcgcagaaaaaaaggatctcaagaagatcctttgatcttttctactgaaccgctctagatttcagtgcaatttatctcttcaaatgtagcacctga

SEQ ID NO: 189 - DNA, 5484 bp, synthetic construct
  source 1..5484: mol_type = other DNA
agtcagccccatacgatataagttgtaattctcatgttagtcatgccccgcgcccaccggaaggagctgactgggttgaaggctctcaagggcatcggtcgagatcccggtgcctaatgagtgagctaacttacattaattgcgttgcgctcactgcccgctttccagtcgggaaacctgtcgtgccagctgcattaatgaatcggccaacgcgcggggagaggcggtttgcgtattgggcgccagggtggtttttcttttcaccagtgagacgggcaacagctgattgcccttcaccgcctggccctgagagagttgcagcaagcggtccacgctggtttgccccagcaggcgaaaatcctgtttgatggtggttaacggcgggatataacatgagctgtcttcggtatcgtcgtatcccactaccgagatgtccgcaccaacgcgcagcccggactcggtaatggcgcgcattgcgcccagcgccatctgatcgttggcaaccagcatcgcagtgggaacgatgccctcattcagcatttgcatggtttgttgaaaaccggacatggcactccagtcgccttcccgttccgctatcggctgaatttgattgcgagtgagatatttatgccagccagccagacgcagacgcgccgagacagaacttaatgggcccgctaacagcgcgatttgctggtgacccaatgcgaccagatgctccacgcccagtcgcgtaccgtcttcatgggagaaaataatactgttgatgggtgtctggtcagagacatcaagaaataacgccggaacattagtgcaggcagcttccacagcaatggcatcctggtcatccagcggatagttaatgatcagcccactgacgcgttgcgcgagaagattgtgcaccgccgctttacaggcttcgacgccgcttcgttctaccatcgacaccaccacgctggcacccagttgatcggcgcgagatttaatcgccgcgacaatttgcgacggcgcgtgcagggccagactggaggtggcaacgccaatcagcaacgactgtttgcccgccagttgttgtgccacgcggttgggaatgtaattcagctccgccatcgccgcttccactttttcccgcgttttcgcagaaacgtggctggcctggttcaccacgcgggaaacggtctgataagagacaccggcatactctgcgacatcgtataacgttactggtttcacattcaccaccctgaattgactctcttccgggcgctatcatgccataccgcgaaaggttttgcgccattcgatggtgtccgggagaaattaatacgactcactataggcctcgagttaactaaagggaattttcccttgagtaaatattttatagaatcaacttacaaggataaaagtggtaaagaaaacaaatgctatttgctaactaagatgggtaattaaactgttataacaaatctaaacaaaactatacaaatatgtatagaaaaatagatttataacaggaagccctgtgtatcatgtgaatggtgcatactcggtgttaattgcttttaactcctaaagccttacaaccaaagcgaagttggaaacgacaagcgtaacggtgcgaaagctgaaaaaatagtaaggatggcataagctgaaataaaatccaattaggttctataaaagggtggtcgtgacatatagaaaacgttgggtgctaaatgctgtaataatggatgtttagcagggaaattcctaagtcttttaagatatggaagaccttcaacgactatctccttgagggagagtaaagccacaagccaacggtggaagaaaaataccgcatctcttttgagatgaagatatagtctacgctcatatgaaagtatgagaggtctactcgtgagagaaagactgctataggtgttgcgacctatagtgaataagaaaaatatatacaaatataaaaaatattgacatatctctctaaaaagtgtaatatattattatactaaagggaggtgagtacatgatagtagcaattaaaataaaattaaagccaactaaagaacaagaggttttattttggaagtcagcaggagttgcaaggtggtcttataactattttttatcagaaagtgaaagacactaccaagagtatcttgaaggtaaacaagacaagaaaaccataaaagaaagcgaagtcagaaaatatattaataatgtattaaaaaagactactcatacatggcttgaagaagttggaagcaatgtaatgaaacaagcagtaaaagatgctgacatagctagaaaaagatggtttgatggtgttgcaaacaagccgaaattcaaaagtaagcgaaaaagtaaagttagtttttatgtgaattatgaaagtctaaagcgaacaaataatggctttagaggtgaaaaaatcggtgtagtaaaaacatatcaagcattaccaaagttaaagaaaggtgaaaaatattcaaatccacgaatatcatttgatggtatgaattggtttatatctataggatataacaatgaatttaaagctgtcaaattaactgatgttagtttaggaattgccgttggtataaaagaattagctgtgtgttcagacggtcaatttaagaaaaatataaataaaactaaaagagttagattccttgaaaagaaattgaaacgtgaacagcgaaagataagtcataaactcgaagctaatattaaaagttatgataagaatagaaaaccgatttataaaagacctttaagagatatgaaaaatatccaaaaacaaaacagaataattcgtaatttatataaaaaacttgaaaatattcgcacaaattatttgcatcaatgttccaatgagatagtgaaaaccaagccttctcgaattgttatggaaacattgaatataaaaggtatgatgaagaataagcatttatctaaagctatagctaatcaaaagttatatgaatttaaaagacaaattcaatacaaatgtaagaagtatggaattaaatttgttgaagctgataaatggtatccatcatcaaaaacttgtagttgttgtggtcaagttaaatcagatttaaagcttaaagacagattatatgtctgtaattgtggcttaaagatggatagagatttgaacgcaagtattaatttagcaaattaccaaattcaaagtgcttaacctaaactaagctttgaatatgtacgtaacgatactacggaatttaagcctgttaagagtcatatcaaatggtagtagctttggcaaacccagattcgttgaagcaggaagacacaagacgaaaatcataagacataagtcgtgtcatagtataaatgtctacatttaaatagaaatgtatatatttttcgtatcggttgtgaatttttagccaataaatttaatggtgaaaaagggatactatttactgctaaatatgttgaaagatttaatgaaatggaagagaaacagaatcaagcgcctaggctgctgccaccgctgagcaataactagcataaccccttggggcctctaaacgggtcttgaggggttttttgctgaaacctcaggcatttgagaagcacacggtcacactgcttccggtagtcaataaaccggtaaaccagcaatagacataagcggctatttaacgaccctgccctgaaccgacgaccgggtcatcgtggccggatcttgcggcccctcggcttgaacgaattgttagacattatttgccgactaccttggtgatctcgcctttcacgtagtggacaaattcttccaactgatctgcgcgcgaggccaagcgatcttcttcttgtccaagataagcctgtctagcttcaagtatgacgggctgatactgggccggcaggcgctccattgcccagtcggcagcgacatccttcggcgcgattttgccggttactgcgctgtaccaaatgcgggacaacgtaagcactacatttcgctcatcgccagcccagtcgggcggcgagttccatagcgttaaggtttcatttagcgcctcaaatagatcctgttcaggaaccggatcaaagagttcctccgccgctggacctaccaaggcaacgctatgttctcttgcttttgtcagcaagatagccagatcaatgtcgatcgtggctggctcgaagatacctgcaagaatgtcattgcgctgccattctccaaattgcagttcgcgcttagctggataacgccacggaatgatgtcgtcgtgcacaacaatggtgacttctacagcgcggagaatctcgctctctccaggggaagccgaagtttccaaaaggtcgttgatcaaagctcgccgcgttgtttcatcaagccttacggtcaccgtaaccagcaaatcaatatcactgtgtggcttcaggccgccatccactgcggagccgtacaaatgtacggccagcaacgtcggttcgagatggcgctcgatgacgccaactacctctgatagttgagtcgatacttcggcgatcaccgcttccctcatactcttcctttttcaatattattgaagcatttatcagggttattgtctcatgagcggatacatatttgaatgtatttagaaaaataaacaaatagctagctcactcggtcgctacgctccgggcgtgagactgcggcgggcgctgcggacacatacaaagttacccacagattccgtggataagcaggggactaacatgtgaggcaaaacagcagggccgcgccggtggcgtttttccataggctccgccctcctgccagagttcacataaacagacgcttttccggtgcatctgtgggagccgtgaggctcaaccatgaatctgacagtacgggcgaaacccgacaggacttaaagatccccaccgtttccggcgggtcgctccctcttgcgctctcctgttccgaccctgccgtttaccggatacctgttccgcctttctcccttacgggaagtgtggcgctttctcatagctcacacactggtatctcggctcggtgtaggtcgttcgctccaagctgggctgtaagcaagaactccccgttcagcccgactgctgcgccttatccggtaactgttcacttgagtccaacccggaaaagcacggtaaaacgccactggcagcagccattggtaactgggagttcgcagaggatttgtttagctaaacacgcggttgctcttgaagtgtgcgccaaagtccggctacactggaaggacagatttggttgctgtgctctgcgaaagccagttaccacggttaagcagttccccaactgacttaaccttcgatcaaaccacctccccaggtggttttttcgtttacagggcaaaagattacgcgcagaaaaaaaggatctcaagaagatcctttgatcttttctactgaaccgctctagatttcagtgcaatttatctcttcaaatgtagcacctga

SEQ ID NO: 190 - DNA, 5016 bp, synthetic construct
  source 1..5016: mol_type = other DNA
agttccccaactgacttaaccttcgatcaaaccacctccccaggtggttttttcgtttacagggcaaaagattacgcgcagaaaaaaaggatctcaagaagatcctttgatcttttctactgaaccgctctagatttcagtgcaatttatctcttcaaatgtagcacctgaagtcagccccatacgatataagttgtaattctcatgttagtcatgccccgcgcccaccggaaggagctgactgggttgaaggctctcaagggcatcggtcgagatcccggtgcctaatgagtgagctaacttacattaattgcgttgcgctcactgcccgctttccagtcgggaaacctgtcgtgccagctgcattaatgaatcggccaacgcgcggggagaggcggtttgcgtattgggcgccagggtggtttttcttttcaccagtgagacgggcaacagctgattgcccttcaccgcctggccctgagagagttgcagcaagcggtccacgctggtttgccccagcaggcgaaaatcctgtttgatggtggttaacggcgggatataacatgagctgtcttcggtatcgtcgtatcccactaccgagatgtccgcaccaacgcgcagcccggactcggtaatggcgcgcattgcgcccagcgccatctgatcgttggcaaccagcatcgcagtgggaacgatgccctcattcagcatttgcatggtttgttgaaaaccggacatggcactccagtcgccttcccgttccgctatcggctgaatttgattgcgagtgagatatttatgccagccagccagacgcagacgcgccgagacagaacttaatgggcccgctaacagcgcgatttgctggtgacccaatgcgaccagatgctccacgcccagtcgcgtaccgtcttcatgggagaaaataatactgttgatgggtgtctggtcagagacatcaagaaataacgccggaacattagtgcaggcagcttccacagcaatggcatcctggtcatccagcggatagttaatgatcagcccactgacgcgttgcgcgagaagattgtgcaccgccgctttacaggcttcgacgccgcttcgttctaccatcgacaccaccacgctggcacccagttgatcggcgcgagatttaatcgccgcgacaatttgcgacggcgcgtgcagggccagactggaggtggcaacgccaatcagcaacgactgtttgcccgccagttgttgtgccacgcggttgggaatgtaattcagctccgccatcgccgcttccactttttcccgcgttttcgcagaaacgtggctggcctggttcaccacgcgggaaacggtctgataagagacaccggcatactctgcgacatcgtataacgttactggtttcacattcaccaccctgaattgactctcttccgggcgctatcatgccataccgcgaaaggttttgcgccattcgatggtgtccgggattgacagctagctcagtcctaggtataatgctagcgtggagatatacctcgagaattaccaaattcaaagtgcttaacctaaactaagctttgaatatgtacgtaacgatactacggaatttaagcctgttaagagtcatatcaaatggtagtagctttggcaaacccagattcgttgaagcaggaagacacaagacgaaaatcataagacataagtcgtgtcatagtataaatgtctacatttaaatagaaatgtatatatttttcgtatcggttgtgaatttttagccaataaatttaatggtgaaaaaggctcgcggccgcaataactagcataaccccttggggcctctaaacgggtcttgaggggttttttgctgaacgtacgttttacggctagctcagtcctaggtactatgctagcgtggagatatacggtaccaaggagatataccatggactacaaagaccatgacggtgattataaagatcatgacatcgattacaaggatgacgatgacaagggaggaagcggatcgatgggcattgtcgcgattaagatcaagctgaagccaacaaaagaacaagaggtgcttttctggaaatccgcaggagttgctcgctggtcctacaactactttctttcggaatctgagcgtcattatcaagagtatttagagggtaaacaagacaaaaaaaccattaaagaaagtgaggtccgcaaatatattaataacgtccttaaaaaaacgacacatacctggcttgaggaagttggttctaacgtgatgaaacaggccgtaaaagacgctgacatcgctcgtaaacgttggtttgacggagtagcgaacaagcccaagttcaagtcgaaacgcaaatcaaaggtctccttttacgtgaactacgagtctctgaagcgcacgaataatggctttcgcggagagaagattggcgtcgtgaagacgtatcaagcccttcctaaacttaagaaaggtgagaaatacagcaaccctcgcatctcctttgatgggatgaattggttcatcagcattgggtacaataacgagtttaaggccgtgaaattgacggacgtcagtcttggcattgacgtagggattaaggaattagcggtttgtagtgatgggcaattcaaaaaaaatatcaataagactaaacgcgtacgttttcttgaaaaaaagcttaagcgcgaacagcgcaagatctctcacaagctggaagctaacattaaaagttatgataagaaccgcaaacccatctacaaacgccccttgcgtgatatgaagaacattcagaagcagaatcgtatcatccgtaacttgtataagaaactggaaaacattcgtactaactacctgcatcaatgttctaatgaaattgtgaaaaccaagccctctcgtattgttatggaaacgttgaatattaagggcatgatgaaaaataagcatctgtccaaggcgattgccaatcaaaaattgtatgaatttaaacgccagattcaatacaagtgtaaaaaatatggaattaaattcgtagaagctgacaaatggtatccctcatctaaaacctgttcgtgctgtggtcaggtcaaatccgacctgaagcttaaagaccgtctttatgtttgcaactgcggccttaagatggatcgcgatttaaacgcatcgatcaacttagcgaactaccaaatccaaagtgcgtaataagaattcctgctgccaccgctgagcaataactagcataaccccttggggcctctaaacgggtcttgaggggttttttgctgaaacctcaggcatttgagaagcacacggtcacactgcttccggtagtcaataaaccggtaaaccagcaatagacataagcggctatttaacgaccctgccctgaaccgacgaccgggtcatcgtggccggatcttgcggcccctcggcttgaacgaattgttagacattatttgccgactaccttggtgatctcgcctttcacgtagtggacaaattcttccaactgatctgcgcgcgaggccaagcgatcttcttcttgtccaagataagcctgtctagcttcaagtatgacgggctgatactgggccggcaggcgctccattgcccagtcggcagcgacatccttcggcgcgattttgccggttactgcgctgtaccaaatgcgggacaacgtaagcactacatttcgctcatcgccagcccagtcgggcggcgagttccatagcgttaaggtttcatttagcgcctcaaatagatcctgttcaggaaccggatcaaagagttcctccgccgctggacctaccaaggcaacgctatgttctcttgcttttgtcagcaagatagccagatcaatgtcgatcgtggctggctcgaagatacctgcaagaatgtcattgcgctgccattctccaaattgcagttcgcgcttagctggataacgccacggaatgatgtcgtcgtgcacaacaatggtgacttctacagcgcggagaatctcgctctctccaggggaagccgaagtttccaaaaggtcgttgatcaaagctcgccgcgttgtttcatcaagccttacggtcaccgtaaccagcaaatcaatatcactgtgtggcttcaggccgccatccactgcggagccgtacaaatgtacggccagcaacgtcggttcgagatggcgctcgatgacgccaactacctctgatagttgagtcgatacttcggcgatcaccgcttccctcatactcttcctttttcaatattattgaagcatttatcagggttattgtctcatgagcggatacatatttgaatgtatttagaaaaataaacaaatagctagctcactcggtcgctacgctccgggcgtgagactgcggcgggcgctgcggacacatacaaagttacccacagattccgtggataagcaggggactaacatgtgaggcaaaacagcagggccgcgccggtggcgtttttccataggctccgccctcctgccagagttcacataaacagacgcttttccggtgcatctgtgggagccgtgaggctcaaccatgaatctgacagtacgggcgaaacccgacaggacttaaagatccccaccgtttccggcgggtcgctccctcttgcgctctcctgttccgaccctgccgtttaccggatacctgttccgcctttctcccttacgggaagtgtggcgctttctcatagctcacacactggtatctcggctcggtgtaggtcgttcgctccaagctgggctgtaagcaagaactccccgttcagcccgactgctgcgccttatccggtaactgttcacttgagtccaacccggaaaagcacggtaaaacgccactggcagcagccattggtaactgggagttcgcagaggatttgtttagctaaacacgcggttgctcttgaagtgtgcgccaaagtccggctacactggaaggacagatttggttgctgtgctctgcgaaagccagttaccacggttaagc

SEQ ID NO: 191 - DNA, 6079 bp, synthetic construct
  source 1..6079: mol_type = other DNA
agtcagccccatacgatataagttgtaattctcatgttagtcatgccccgcgcccaccggaaggagctgactgggttgaaggctctcaagggcatcggtcgagatcccggtgcctaatgagtgagctaacttacattaattgcgttgcgctcactgcccgctttccagtcgggaaacctgtcgtgccagctgcattaatgaatcggccaacgcgcggggagaggcggtttgcgtattgggcgccagggtggtttttcttttcaccagtgagacgggcaacagctgattgcccttcaccgcctggccctgagagagttgcagcaagcggtccacgctggtttgccccagcaggcgaaaatcctgtttgatggtggttaacggcgggatataacatgagctgtcttcggtatcgtcgtatcccactaccgagatgtccgcaccaacgcgcagcccggactcggtaatggcgcgcattgcgcccagcgccatctgatcgttggcaaccagcatcgcagtgggaacgatgccctcattcagcatttgcatggtttgttgaaaaccggacatggcactccagtcgccttcccgttccgctatcggctgaatttgattgcgagtgagatatttatgccagccagccagacgcagacgcgccgagacagaacttaatgggcccgctaacagcgcgatttgctggtgacccaatgcgaccagatgctccacgcccagtcgcgtaccgtcttcatgggagaaaataatactgttgatgggtgtctggtcagagacatcaagaaataacgccggaacattagtgcaggcagcttccacagcaatggcatcctggtcatccagcggatagttaatgatcagcccactgacgcgttgcgcgagaagattgtgcaccgccgctttacaggcttcgacgccgcttcgttctaccatcgacaccaccacgctggcacccagttgatcggcgcgagatttaatcgccgcgacaatttgcgacggcgcgtgcagggccagactggaggtggcaacgccaatcagcaacgactgtttgcccgccagttgttgtgccacgcggttgggaatgtaattcagctccgccatcgccgcttccactttttcccgcgttttcgcagaaacgtggctggcctggttcaccacgcgggaaacggtctgataagagacaccggcatactctgcgacatcgtataacgttactggtttcacattcaccaccctgaattgactctcttccgggcgctatcatgccataccgcgaaaggttttgcgccattcgatggtgtccgggagaaattaatacgactcactataggcctcgagttaactaaagggaattttcccttgagtaaatattttatagaatcaacttacaaggataaaagtggtaaagaaaacaaatgctatttgctaactaagatgggtaattaaactgttataacaaatctaaacaaaactatacaaatatgtatagaaaaatagatttataacaggaagccctgtgtatcatgtgaatggtgcatactcggtgttaattgcttttaactcctaaagccttacaaccaaagcgaagttggaaacgacaagcgtaacggtgcgaaagctgaaaaaatagtaaggatggcataagctgaaataaaatccaattaggttctataaaagggtggtcgtgacatatagaaaacgttgggtgctaaatgctgtaataatggatgtttagcagggaaattcctaagtcttttaagatatggaagaccttcaacgactatctccttgagggagagtaaagccacaagccaacggtggaagaaaaataccgcatctcttttgagatgaagatatagtctacgctcatatgaaagtatgagaggtctactcgtgagagaaagactgctataggtgttgcgacctatagtgaataagaaaaatatatacaaatataaaaaatattgacatatctctctaaaaagtgtaatatattattatactaaagggaggtgagtacatggaattaatgtccattggtaaatttgctaaacgtgtaggcgttaatgttgttactctgagaagaatggaggctaagggagagtttcttccagctcatgtttcttctggaggaactaggtattattcaacggatcagttgaaatactttggaaaagaacgaaatgcacataagttagttgtggggtactgtcgtgttagtacaccaagtcaaaaggacgacttagagaatcaagtaaacaatgtaaaatcttatatgattgccaaaggctatcagtttgaaataatcaaagacattggctcaggaattaattataagaaaaagggcttaaaagaattgatagataagataaataaccaagaagtaagtaaggtggttatcttatacaaagatagattaattcgatttggctttgaattaattgaatatttatgtcaaataaacaacgttgaacttgaaattatagatcattcagaaaagtctaaagaggaagaactaacagatgatttaattcaaatcattacagtttttgcaaatagattatatggtcaaaggtctaaaaaaactaagcgtctaattgaggaagtgaaaaacaatgatagtagcaattaaaataaaattaaagccaactaaagaacaagaggttttattttggaagtcagcaggagttgcaaggtggtcttataactattttttatcagaaagtgaaagacactaccaagagtatcttgaaggtaaacaagacaagaaaaccataaaagaaagcgaagtcagaaaatatattaataatgtattaaaaaagactactcatacatggcttgaagaagttggaagcaatgtaatgaaacaagcagtaaaagatgctgacatagctagaaaaagatggtttgatggtgttgcaaacaagccgaaattcaaaagtaagcgaaaaagtaaagttagtttttatgtgaattatgaaagtctaaagcgaacaaataatggctttagaggtgaaaaaatcggtgtagtaaaaacatatcaagcattaccaaagttaaagaaaggtgaaaaatattcaaatccacgaatatcatttgatggtatgaattggtttatatctataggatataacaatgaatttaaagctgtcaaattaactgatgttagtttaggaattgacgttggtataaaagaattagctgtgtgttcagacggtcaatttaagaaaaatataaataaaactaaaagagttagattccttgaaaagaaattgaaacgtgaacagcgaaagataagtcataaactcgaagctaatattaaaagttatgataagaatagaaaaccgatttataaaagacctttaagagatatgaaaaatatccaaaaacaaaacagaataattcgtaatttatataaaaaacttgaaaatattcgcacaaattatttgcatcaatgttccaatgagatagtgaaaaccaagccttctcgaattgttatggaaacattgaatataaaaggtatgatgaagaataagcatttatctaaagctatagctaatcaaaagttatatgaatttaaaagacaaattcaatacaaatgtaagaagtatggaattaaatttgttgaagctgataaatggtatccatcatcaaaaacttgtagttgttgtggtcaagttaaatcagatttaaagcttaaagacagattatatgtctgtaattgtggcttaaagatggatagagatttgaacgcaagtattaatttagcaaattaccaaattcaaagtgcttaacctaaactaagctttgaatatgtacgtaacgatactacggaatttaagcctgttaagagtcatatcaaatggtagtagctttggcaaacccagattcgttgaagcaggaagacacaagacgaaaatcataagacataagtcgtgtcatagtataaatgtctacatttaaatagaaatgtatatatttttcgtatcggttgtgaatttttagccaataaatttaatggtgaaaaagggatactatttactgctaaatatgttgaaagatttaatgaaatggaagagaaacagaatcaagcgcctaggctgctgccaccgctgagcaataactagcataaccccttggggcctctaaacgggtcttgaggggttttttgctgaaacctcaggcatttgagaagcacacggtcacactgcttccggtagtcaataaaccggtaaaccagcaatagacataagcggctatttaacgaccctgccctgaaccgacgaccgggtcatcgtggccggatcttgcggcccctcggcttgaacgaattgttagacattatttgccgactaccttggtgatctcgcctttcacgtagtggacaaattcttccaactgatctgcgcgcgaggccaagcgatcttcttcttgtccaagataagcctgtctagcttcaagtatgacgggctgatactgggccggcaggcgctccattgcccagtcggcagcgacatccttcggcgcgattttgccggttactgcgctgtaccaaatgcgggacaacgtaagcactacatttcgctcatcgccagcccagtcgggcggcgagttccatagcgttaaggtttcatttagcgcctcaaatagatcctgttcaggaaccggatcaaagagttcctccgccgctggacctaccaaggcaacgctatgttctcttgcttttgtcagcaagatagccagatcaatgtcgatcgtggctggctcgaagatacctgcaagaatgtcattgcgctgccattctccaaattgcagttcgcgcttagctggataacgccacggaatgatgtcgtcgtgcacaacaatggtgacttctacagcgcggagaatctcgctctctccaggggaagccgaagtttccaaaaggtcgttgatcaaagctcgccgcgttgtttcatcaagccttacggtcaccgtaaccagcaaatcaatatcactgtgtggcttcaggccgccatccactgcggagccgtacaaatgtacggccagcaacgtcggttcgagatggcgctcgatgacgccaactacctctgatagttgagtcgatacttcggcgatcaccgcttccctcatactcttcctttttcaatattattgaagcatttatcagggttattgtctcatgagcggatacatatttgaatgtatttagaaaaataaacaaatagctagctcactcggtcgctacgctccgggcgtgagactgcggcgggcgctgcggacacatacaaagttacccacagattccgtggataagcaggggactaacatgtgaggcaaaacagcagggccgcgccggtggcgtttttccataggctccgccctcctgccagagttcacataaacagacgcttttccggtgcatctgtgggagccgtgaggctcaaccatgaatctgacagtacgggcgaaacccgacaggacttaaagatccccaccgtttccggcgggtcgctccctcttgcgctctcctgttccgaccctgccgtttaccggatacctgttccgcctttctcccttacgggaagtgtggcgctttctcatagctcacacactggtatctcggctcggtgtaggtcgttcgctccaagctgggctgtaagcaagaactccccgttcagcccgactgctgcgccttatccggtaactgttcacttgagtccaacccggaaaagcacggtaaaacgccactggcagcagccattggtaactgggagttcgcagaggatttgtttagctaaacacgcggttgctcttgaagtgtgcgccaaagtccggctacactggaaggacagatttggttgctgtgctctgcgaaagccagttaccacggttaagcagttccccaactgacttaaccttcgatcaaaccacctccccaggtggttttttcgtttacagggcaaaagattacgcgcagaaaaaaaggatctcaagaagatcctttgatcttttctactgaaccgctctagatttcagtgcaatttatctcttcaaatgtagcacctga

SEQ ID NO: 192 - DNA, 4329 bp, synthetic construct
  source 1..4329: mol_type = other DNA
agtcagccccatacgatataagttgtaattctcatgttagtcatgccccgcgcccaccggaaggagctgactgggttgaaggctctcaagggcatcggtcgagatcccggtgcctaatgagtgagctaacttacattaattgcgttgcgctcactgcccgctttccagtcgggaaacctgtcgtgccagctgcattaatgaatcggccaacgcgcggggagaggcggtttgcgtattgggcgccagggtggtttttcttttcaccagtgagacgggcaacagctgattgcccttcaccgcctggccctgagagagttgcagcaagcggtccacgctggtttgccccagcaggcgaaaatcctgtttgatggtggttaacggcgggatataacatgagctgtcttcggtatcgtcgtatcccactaccgagatgtccgcaccaacgcgcagcccggactcggtaatggcgcgcattgcgcccagcgccatctgatcgttggcaaccagcatcgcagtgggaacgatgccctcattcagcatttgcatggtttgttgaaaaccggacatggcactccagtcgccttcccgttccgctatcggctgaatttgattgcgagtgagatatttatgccagccagccagacgcagacgcgccgagacagaacttaatgggcccgctaacagcgcgatttgctggtgacccaatgcgaccagatgctccacgcccagtcgcgtaccgtcttcatgggagaaaataatactgttgatgggtgtctggtcagagacatcaagaaataacgccggaacattagtgcaggcagcttccacagcaatggcatcctggtcatccagcggatagttaatgatcagcccactgacgcgttgcgcgagaagattgtgcaccgccgctttacaggcttcgacgccgcttcgttctaccatcgacaccaccacgctggcacccagttgatcggcgcgagatttaatcgccgcgacaatttgcgacggcgcgtgcagggccagactggaggtggcaacgccaatcagcaacgactgtttgcccgccagttgttgtgccacgcggttgggaatgtaattcagctccgccatcgccgcttccactttttcccgcgttttcgcagaaacgtggctggcctggttcaccacgcgggaaacggtctgataagagacaccggcatactctgcgacatcgtataacgttactggtttcacattcaccaccctgaattgactctcttccgggcgctatcatgccataccgcgaaaggttttgcgccattcgatggtgtccgggagaaattaatacgactcactataggcctcgagttaactaaagggaattttcccttgagtaaatattttatagaatcaacttacaaggataaaagtggtaaagaaaacaaatgctatttgctaactaagatgggtaattaaactgttataacaaatctaaacaaaactatacaaatatgtatagaaaaatagatttataacaggaagccctgtgtatcatgtgaatggtgcatactcggtgttaattgcttttaactcctaaagccttacaaccaaagcgaagttggaaacgacaagcgtaacggtgcgaaagctgaaaaaatagtaaggatggcataagctgaaataaaatccaattaggttctataaaagggtggtcgtgacatatagaaaacgttgggtgctaaatgctgtaataatggatgtttagcagggaaattcctaagtcttttaagatatggaagaccttcaacgactatctccttgagggagagtaaagccacaagccaacggtggaagaaaaataccgcatctcttttgagatgaagatatagtctacgctcatatgaaagtatgagaggtctactcgtgagagaaagactgctataggtgttgcgacctatagtgaataagaaaaatatatacaaatataaaaaatattgacatatctctctaaaaagtgtaatatattattatactaaagggaggtgagtacaattaccaaattcaaagtgcttaacctaaactaagctttgaatatgtacgtaacgatactacggaatttaagcctgttaagagtcatatcaaatggtagtagctttggcaaacccagattcgttgaagcaggaagacacaagacgaaaatcataagacataagtcgtgtcatagtataaatgtctacatttaaatagaaatgtatatatttttcgtatcggttgtgaatttttagccaataaatttaatggtgaaaaagggatactatttactgctaaatatgttgaaagatttaatgaaatggaagagaaacagaatcaagcgcctaggctgctgccaccgctgagcaataactagcataaccccttggggcctctaaacgggtcttgaggggttttttgctgaaacctcaggcatttgagaagcacacggtcacactgcttccggtagtcaataaaccggtaaaccagcaatagacataagcggctatttaacgaccctgccctgaaccgacgaccgggtcatcgtggccggatcttgcggcccctcggcttgaacgaattgttagacattatttgccgactaccttggtgatctcgcctttcacgtagtggacaaattcttccaactgatctgcgcgcgaggccaagcgatcttcttcttgtccaagataagcctgtctagcttcaagtatgacgggctgatactgggccggcaggcgctccattgcccagtcggcagcgacatccttcggcgcgattttgccggttactgcgctgtaccaaatgcgggacaacgtaagcactacatttcgctcatcgccagcccagtcgggcggcgagttccatagcgttaaggtttcatttagcgcctcaaatagatcctgttcaggaaccggatcaaagagttcctccgccgctggacctaccaaggcaacgctatgttctcttgcttttgtcagcaagatagccagatcaatgtcgatcgtggctggctcgaagatacctgcaagaatgtcattgcgctgccattctccaaattgcagttcgcgcttagctggataacgccacggaatgatgtcgtcgtgcacaacaatggtgacttctacagcgcggagaatctcgctctctccaggggaagccgaagtttccaaaaggtcgttgatcaaagctcgccgcgttgtttcatcaagccttacggtcaccgtaaccagcaaatcaatatcactgtgtggcttcaggccgccatccactgcggagccgtacaaatgtacggccagcaacgtcggttcgagatggcgctcgatgacgccaactacctctgatagttgagtcgatacttcggcgatcaccgcttccctcatactcttcctttttcaatattattgaagcatttatcagggttattgtctcatgagcggatacatatttgaatgtatttagaaaaataaacaaatagctagctcactcggtcgctacgctccgggcgtgagactgcggcgggcgctgcggacacatacaaagttacccacagattccgtggataagcaggggactaacatgtgaggcaaaacagcagggccgcgccggtggcgtttttccataggctccgccctcctgccagagttcacataaacagacgcttttccggtgcatctgtgggagccgtgaggctcaaccatgaatctgacagtacgggcgaaacccgacaggacttaaagatccccaccgtttccggcgggtcgctccctcttgcgctctcctgttccgaccctgccgtttaccggatacctgttccgcctttctcccttacgggaagtgtggcgctttctcatagctcacacactggtatctcggctcggtgtaggtcgttcgctccaagctgggctgtaagcaagaactccccgttcagcccgactgctgcgccttatccggtaactgttcacttgagtccaacccggaaaagcacggtaaaacgccactggcagcagccattggtaactgggagttcgcagaggatttgtttagctaaacacgcggttgctcttgaagtgtgcgccaaagtccggctacactggaaggacagatttggttgctgtgctctgcgaaagccagttaccacggttaagcagttccccaactgacttaaccttcgatcaaaccacctccccaggtggttttttcgtttacagggcaaaagattacgcgcagaaaaaaaggatctcaagaagatcctttgatcttttctactgaaccgctctagatttcagtgcaatttatctcttcaaatgtagcacctga

SEQ ID NO: 193 - DNA, 2357 bp, synthetic construct
  source 1..2357: mol_type = other DNA
tttgtttatttttctaaatacattcaaatatgtatccgctcatgagacaataaccctgataaatgcttcaataatattgaaaaaggaagagtatgagccatattcaacgggaaacgtcttgctctaggccgcgattaaattccaacatggatgctgatttatatgggtataaatgggctcgcgataatgtcgggcaatcaggtgcgacaatctatcgattgtatgggaagcccgatgcgccagagttgtttctgaaacatggcaaaggtagcgttgccaatgatgttacagatgagatggtcagactaaactggctgacggaatttatgcctcttccgaccatcaagcattttatccgtactcctgatgatgcatggttactcaccactgcgatccccgggaaaacagcattccaggtattagaagaatatcctgattcaggtgaaaatattgttgatgcgctggcagtgttcctgcgccggttgcattcgattcctgtttgtaattgtccttttaacagcgaccgcgtatttcgtctcgctcaggcgcaatcacgaatgaataacggtttggttgatgcgagtgattttgatgacgagcgtaatggctggcctgttgaacaagtctggaaagaaatgcataaacttttgccattctcaccggattcagtcgtcactcatggtgatttctcacttgataaccttatttttgacgaggggaaattaataggttgtattgatgttggacgagtcggaatcgcagaccgataccaggatcttgccatcctatggaactgcctcggtgagttttctccttcattacagaaacggctttttcaaaaatatggtattgataatcctgatatgaataaattgcagtttcatttgatgctcgatgagtttttctaagaattaattcatgagcggatacacttaagatttaatgtgagttagctcactcattaggcaccccaggctttacactttatgcttccggctcgtatgttgtgtggaattgtgagcggataacaatttcacggcgcgccgacttcgagcgaaggagacttcgaaatggaacttatgtctatcggtaaatttgcaaagcgcgttggggtaaacgtggtaactttacgtcgtatggaagcgaagggagagtttttacccgcgcacgtttcctcgggtggtactcgctactattctacagatcaactgaagtacttcggcaaagagcgcaacgcgcacaagttggtagtggggtactgccgtgtatcaacacccagtcagaaggatgatttagaaaatcaagtaaacaatgtgaagagttatatgattgccaaagggtatcagttcgagattatcaaagacattggcagcggcatcaactacaaaaaaaaaggactgaaagaactgattgataagattaacaaccaggaggtgtccaaagtggtaattttgtataaggaccgcttaatccgcttcggttttgagcttattgaatacctttgtcagattaataacgttgagctggagatcatcgaccatagtgaaaagtccaaggaggaagaacttacagatgacttgatccaaattattaccgtctttgcgaaccgtttgtacggtcagcgttccaagaaaaccaaacgccttattgaagaggtaaaaaataatgactcatctaattaaattgcactgaaatctagagtgatggtgtcgggaatccgtaaaggatcttcttgagatccttttacgatcgtcgtaatctcctgctctgtaaacgaaaaaaccgcctggggaggcggtttgatcgaaggttaagtcagttggggaactgcttaacctggtaactggctttagtggagcgcagataccaaatactgtcctttcagtgtagcctctgttaggccaccacttcaagactctcgatatctaaatccactaattctcagttaccaatggctgctgccagtggcgttttgtcgtgtctttccgggttggactcaagatgatagttaccggataaggcgcagcagtcgggctgaacggggggttcttgcacacagcccagcttggagcgaactgtctacacggaacgggacgtggtgatttgggtaaagcctccaccacaacacggacgccgcaggacgggaacaggagagcgcaagagggagccatcagggggaaacgcctggtatctttatagtcctgtcgggtttcgccaccactgatttgagcgtcagatttcgtgatgttcgtcaggggggcggagcctatggaaaaacggcttcgctccggccttattgtctctctgctaagtatcctcctggcatcttctaggacgtttctgcgctagcatgccta

SEQ ID NO: 194 - DNA, 2357 bp, synthetic construct
  source 1..2357: mol_type = other DNA
tttgtttatttttctaaatacattcaaatatgtatccgctcatgagacaataaccctgataaatgcttcaataatattgaaaaaggaagagtatgagccatattcaacgggaaacgtcttgctctaggccgcgattaaattccaacatggatgctgatttatatgggtataaatgggctcgcgataatgtcgggcaatcaggtgcgacaatctatcgattgtatgggaagcccgatgcgccagagttgtttctgaaacatggcaaaggtagcgttgccaatgatgttacagatgagatggtcagactaaactggctgacggaatttatgcctcttccgaccatcaagcattttatccgtactcctgatgatgcatggttactcaccactgcgatccccgggaaaacagcattccaggtattagaagaatatcctgattcaggtgaaaatattgttgatgcgctggcagtgttcctgcgccggttgcattcgattcctgtttgtaattgtccttttaacagcgaccgcgtatttcgtctcgctcaggcgcaatcacgaatgaataacggtttggttgatgcgagtgattttgatgacgagcgtaatggctggcctgttgaacaagtctggaaagaaatgcataaacttttgccattctcaccggattcagtcgtcactcatggtgatttctcacttgataaccttatttttgacgaggggaaattaataggttgtattgatgttggacgagtcggaatcgcagaccgataccaggatcttgccatcctatggaactgcctcggtgagttttctccttcattacagaaacggctttttcaaaaatatggtattgataatcctgatatgaataaattgcagtttcatttgatgctcgatgagtttttctaagaattaattcatgagcggatacacttaagatttaatgtgagttagctcactcattaggcaccccaggctttacactttatgcttccggctcgtatgttgtgtggaattgtgagcggataacaatttcacggcgcgccgacttcgagcgaaggagacttcgaaatggaacttatgtctatcggtaaatttgcaaagcgcgttggggtaaacgtggtaactttacgtcgtatggaagcgaagggagagtttttacccgcgcacgtttcctcgggtggtactcgctactattctacagatcaactgaagtacttcggcaaagagcgcaacgcgcacaagttggtagtggggtactgccgtgtagcaacacccagtcagaaggatgatttagaaaatcaagtaaacaatgtgaagagttatatgattgccaaagggtatcagttcgagattatcaaagacattggcagcggcatcaactacaaaaaaaaaggactgaaagaactgattgataagattaacaaccaggaggtgtccaaagtggtaattttgtataaggaccgcttaatccgcttcggttttgagcttattgaatacctttgtcagattaataacgttgagctggagatcatcgaccatagtgaaaagtccaaggaggaagaacttacagatgacttgatccaaattattaccgtctttgcgaaccgtttgtacggtcagcgttccaagaaaaccaaacgccttattgaagaggtaaaaaataatgactcatctaattaaattgcactgaaatctagagtgatggtgtcgggaatccgtaaaggatcttcttgagatccttttacgatcgtcgtaatctcctgctctgtaaacgaaaaaaccgcctggggaggcggtttgatcgaaggttaagtcagttggggaactgcttaacctggtaactggctttagtggagcgcagataccaaatactgtcctttcagtgtagcctctgttaggccaccacttcaagactctcgatatctaaatccactaattctcagttaccaatggctgctgccagtggcgttttgtcgtgtctttccgggttggactcaagatgatagttaccggataaggcgcagcagtcgggctgaacggggggttcttgcacacagcccagcttggagcgaactgtctacacggaacgggacgtggtgatttgggtaaagcctccaccacaacacggacgccgcaggacgggaacaggagagcgcaagagggagccatcagggggaaacgcctggtatctttatagtcctgtcgggtttcgccaccactgatttgagcgtcagatttcgtgatgttcgtcaggggggcggagcctatggaaaaacggcttcgctccggccttattgtctctctgctaagtatcctcctggcatcttctaggacgtttctgcgctagcatgccta

SEQ ID NO: 195 - DNA, 2562 bp, synthetic construct
  source 1..2562: mol_type = other DNA
aaatggagaaaaaaatcactggatataccaccgttgatatatcccaatggcatcgtaaagaacattttgaggcatttcagtcagttgctcaatgtacctataaccagaccgttcagctggatattacggcctttttaaagaccgtaaagaaaaataagcacaagttttatccggcctttattcacattcttgcccgcctgatgaatgctcatccggagttccgtatggcaatgaaagacggtgagctggtgatatgggatagtgttcacccttgttacaccgttttccatgagcaaactgaaacgttttcatcgctctggagtgaataccacgacgatttccggcagtttctacacatatattcgcaagatgtggcgtgttacggtgaaaacctggcctatttccctaaagggtttattgagaatatgtttttcgtctcagccaatccctgggtgagtttcaccagttttgatttaaacgtggccaatatggacaacttcttcgcccccgttttcactatgggcaaatattatacgcaaggcgacaaggtgctgatgccgctggcgattcaggttcatcatgccgtttgtgatggcttccatgtcggcagaatgcttaatgaattacaacagtactgcgatgagtggcagggcggggcgtaatttttttaaggcagttattggtgcccttaaacgcctggttgctacgcctgaataagtgataataagcggatgaatggcagaaattcgaaagcaaattcgacccggtcgtcggttcagggcagggtcgttaaatagccgcttatgtctattgctggttacgcgtcaattcgagggggatcaattccgttttccgctgcataaccctgcttcggggtcattatagcgattttttcggtatatccatcctttttcgcacgatatacaggattttgccaaagggttcgtgtagactttccttggtgtatccaacggcgtcagccgggcaggataggtgaagtaggcccacccgcgagcgggtgttccttcttcactgtcccttattcgcacctggcggtgctcaacgggaatcctgctctgcgaggctggccggctaccgccggcgtaacagatgagggcaagcggatggctgatgaaaccaagccaaccaggaagggcagcccacctatcacggaattgatccggccacgatgcgtccggcgtagaggatctgaagatcagcagttcaacctgttgatagtacgtactaagctctcatgtttcacgtactaagctctcatgtttaacgtactaagctctcatgtttaacgaactaaaccctcatggctaacgtactaagctctcatggctaacgtactaagctctcatgtttcacgtactaagctctcatgtttgaacaataaaattaatataaatcagcaacttaaatagcctctaaggttttaagttttataagaaaaaaaagaatatataaggcttttaaagcttttaaggtttaacggttgtggacaacaagccagggatgtaacgcactgagaagcccttagagcctctcaaagcaattttgagtgacacaggaacacttaacggctgacatgggaattcccctccaccgctgtccatacccatggactactactctagaaattaccaaattcaaagtgcttaacctaaactaagctttgaatatgtacgtaacgatactacggaatttaagcctgttaagagtcatatcaaatggtagtagctttggcaaacccagattcgttgaagcaggaagacacaagacgaaaatcataagacataagtcgtgtcatagtataaatgtctacatttaaatagaaatgtatatatttttcgtatcggtaattaaactgttataacaaatctaaacaaaactatacaaatatgtatagaaaaatagatttataacaggaagccctgtgtatcatgtgaatggtgcatactcggtgttaattgcttttaactcctaaagccttacaaccaaagcgaagttggaaacgacaagcgtaacggtgcgaaagctgaaaaaatagtaaggatggcataagctgaaataaaatccaattaggttctataaaagggtggtcgtgacatatagaaaacgttgggtgctaaatgctgtaataatggatgtttagcagggaaattcctaagtcttttaagatatggaagaccttcaacgactatctccttgagggagagtaaagccacaagccaacggtggaagaaaaataccgcatctcttttgagatgaagatatagtctacgctcatatgaaagtatgagaggtctactcgtgagagaaagactgctataggtgttgcgacctatagtgaataagaaaaatatatacaaatataaaaaatattgacatatctctctaaaaagtgtaatatattattatactaaagggaggtgagtacgcgaaaatgagacgttgatcggcacgtaagaggttccaactttcaccataatgaaataagatcactaccgggcgtattttttgagttatcgagattttcaggagctaaggaagcta

SEQ ID NO: 196 - DNA, 3749 bp, synthetic construct
  source 1..3749: mol_type = other DNA
caggcgtttcccctggcggctccctcgtgcgctctcctgttcctgcctttcggtttaccggtgtcattccgctgttatggccgcgtttgtctcattccacgcctgacactcagttccgggtaggcagttcgctccaagctggactgtatgcacgaaccccccgttcagtccgaccgctgcgccttatccggtaactatcgtcttgagtccaacccggaaagacatgcaaaagcaccactggcagcagccactggtaattgatttagaggagttagtcttgaagtcatgcgccggttaaggctaaactgaaaggacaagttttggtgactgcgctcctccaagccagttacctcggttcaaagagttggtagctcagagaaccttcgaaaaaccgccctgcaaggcggttttttcgttttcagagcaagagattacgcgcagaccaaaacgatctcaagaagatcatcttattaatcagataaaatatttctagatttcagtgcaatttatctcttcaaatgtagcacctgaagtcagccccatacgatataagttgtaattctcatgttagtcatgccccgcgcccaccggaaggagctgactgggttgaaggctctcaagggcatcggtcgagatcccggtgcctaatgagtgagctaacttacattaattgcgttgcgctcactgcccgctttccagtcgggaaacctgtcgtgccagctgcattaatgaatcggccaacgcgcggggagaggcggtttgcgtattgggcgccagggtggtttttcttttcaccagtgagacgggcaacagctgattgcccttcaccgcctggccctgagagagttgcagcaagcggtccacgctggtttgccccagcaggcgaaaatcctgtttgatggtggttaacggcgggatataacatgagctgtcttcggtatcgtcgtatcccactaccgagatgtccgcaccaacgcgcagcccggactcggtaatggcgcgcattgcgcccagcgccatctgatcgttggcaaccagcatcgcagtgggaacgatgccctcattcagcatttgcatggtttgttgaaaaccggacatggcactccagtcgccttcccgttccgctatcggctgaatttgattgcgagtgagatatttatgccagccagccagacgcagacgcgccgagacagaacttaatgggcccgctaacagcgcgatttgctggtgacccaatgcgaccagatgctccacgcccagtcgcgtaccgtcttcatgggagaaaataatactgttgatgggtgtctggtcagagacatcaagaaataacgccggaacattagtgcaggcagcttccacagcaatggcatcctggtcatccagcggatagttaatgatcagcccactgacgcgttgcgcgagaagattgtgcaccgccgctttacaggcttcgacgccgcttcgttctaccatcgacaccaccacgctggcacccagttgatcggcgcgagatttaatcgccgcgacaatttgcgacggcgcgtgcagggccagactggaggtggcaacgccaatcagcaacgactgtttgcccgccagttgttgtgccacgcggttgggaatgtaattcagctccgccatcgccgcttccactttttcccgcgttttcgcagaaacgtggctggcctggttcaccacgcgggaaacggtctgataagagacaccggcatactctgcgacatcgtataacgttactggtttcacattcaccaccctgaattgactctcttccgggcgctatcatgccataccgcgaaaggttttgcgccattcgatggtgtccgggatctcgacgctctcccttatgcgactcctgcattaggaaattaatacgactcactataggtatgtacgtaacgatactacggaatttaagcctgttaagagtcatatcaaatggtagtagctttggcaaacccagattcgttgaagcaggaagacacaagacgaaaatcataagacataagtcgtgtcatagtataaatgtctacatttaaatagaaatgtatatatttttcgtatcggttgtgaatttttagccaatactagcataaccccttggggcctctaaacgggtcttgaggggttttttgctgaaacctcaggcatttgagaagcacacggtcacactgcttccggtagtcaataaaccggtaaaccagcaatagacataagcggctatttaacgaccctgccctgaaccgacgaccgggtcgaatttgctttcgaatttctgccattcatccgcttattatcacttattcaggcgtagcaaccaggcgtttaagggcaccaataactgccttaaaaaaattacgccccgccctgccactcatcgcagtactgttgtaattcattaagcattctgccgacatggaagccatcacaaacggcatgatgaacctgaatcgccagcggcatcagcaccttgtcgccttgcgtataatatttgcccatagtgaaaacgggggcgaagaagttgtccatattggccacgtttaaatcaaaactggtgaaactcacccagggattggctgagacgaaaaacatattctcaataaaccctttagggaaataggccaggttttcaccgtaacacgccacatcttgcgaatatatgtgtagaaactgccggaaatcgtcgtggtattcactccagagcgatgaaaacgtttcagtttgctcatggaaaacggtgtaacaagggtgaacactatcccatatcaccagctcaccgtctttcattgccatacggaactccggatgagcattcatcaggcgggcaagaatgtgaataaaggccggataaaacttgtgcttatttttctttacggtctttaaaaaggccgtaatatccagctgaacggtctggttataggtacattgagcaactgactgaaatgcctcaaaatgttctttacgatgccattgggatatatcaacggtggtatatccagtgatttttttctccattttagcttccttagctcctgaaaatctcgataactcaaaaaatacgcccggtagtgatcttatttcattatggtgaaagttggaacctcttacgtgccgatcaacgtctcattttcgccaaaagttggcccagggcttcccggtatcaacagggacaccaggatttatttattctgcgaagtgatcttccgtcacaggtatttattcggcgcaaagtgcgtcgggtgatgctgccaacttactgatttagtgtatgatggtgtttttgaggtgctccagtggcttctgtttctatcagctgtccctcctgttcagctactgacggggtggtgcgtaacggcaaaagcaccgccggacatcagcgctagcggagtgtatactggcttactatgttggcactgatgagggtgtcagtgaagtgcttcatgtggcaggagaaaaaaggctgcaccggtgcgtcagcagaatatgtgatacaggatatattccgcttcctcgctcactgactcgctacgctcggtcgttcgactgcggcgagcggaaatggcttacgaacggggcggagatttcctggaagatgccaggaagatacttaacagggaagtgagagggccgcggcaaagccgtttttccataggctccgcccccctgacaagcatcacgaaatctgacgctcaaatcagtggtggcgaaacccgacaggactataaagatac

SEQ ID NO: 197 - DNA, 6629 bp, synthetic construct
  source 1..6629: mol_type = other DNA
gcaaccaggtgtggaaagtccccaggctccccagcaggcagaagtatgcaaagcatgcatctcaattagtcagcaaccatagtcccgcccctaactccgcccatcccgcccctaactccgcccagttccgcccattctccgccccatggctgactaattttttttatttatgcagaggccgaggccgcctctgcctctgagctattccagaagtagtgaggaggcttttttggaggcctaggcttttgcaaaaagctcccgggagcttgtatatccattttcggatctgatcaagagacaggatgaggatcgtttcgcatgattgaacaagatggattgcacgcaggttctccggccgcttgggtggagaggctattcggctatgactgggcacaacagacaatcggctgctctgatgccgccgtgttccggctgtcagcgcaggggcgcccggttctttttgtcaagaccgacctgtccggtgccctgaatgaactgcaggacgaggcagcgcggctatcgtggctggccacgacgggcgttccttgcgcagctgtgctcgacgttgtcactgaagcgggaagggactggctgctattgggcgaagtgccggggcaggatctcctgtcatctcaccttgctcctgccgagaaagtatccatcatggctgatgcaatgcggcggctgcatacgcttgatccggctacctgcccattcgaccaccaagcgaaacatcgcatcgagcgagcacgtactcggatggaagccggtcttgtcgatcaggatgatctggacgaagagcatcaggggctcgcgccagccgaactgttcgccaggctcaaggcgcgcatgcccgacggcgaggatctcgtcgtgacccatggcgatgcctgcttgccgaatatcatggtggaaaatggccgcttttctggattcatcgactgtggccggctgggtgtggcggaccgctatcaggacatagcgttggctacccgtgatattgctgaagagcttggcggcgaatgggctgaccgcttcctcgtgctttacggtatcgccgctcccgattcgcagcgcatcgccttctatcgccttcttgacgagttcttctgagcgggactctggggttcgaaatgaccgaccaagcgacgcccaacctgccatcacgagatttcgattccaccgccgccttctatgaaaggttgggcttcggaatcgttttccgggacgccggctggatgatcctccagcgcggggatctcatgctggagttcttcgcccaccccaacttgtttattgcagcttataatggttacaaataaagcaatagcatcacaaatttcacaaataaagcatttttttcactgcattctagttgtggtttgtccaaactcatcaatgtatcttatcatgtctgtataccgtcgacctctagctagagcttggcgtaatcatggtcatagctgtttcctgtgtgaaattgttatccgctcacaattccacacaacatacgagccggaagcataaagtgtaaagcctggggtgcctaatgagtgagctaactcacattaattgcgttgcgctcactgcccgctttccagtcgggaaacctgtcgtgccagctgcattaatgaatcggccaacgcgcggggagaggcggtttgcgtattgggcgctcttccgcttcctcgctcactgactcgctgcgctcggtcgttcggctgcggcgagcggtatcagctcactcaaaggcggtaatacggttatccacagaatcaggggataacgcaggaaagaacatgtgagcaaaaggccagcaaaaggccaggaaccgtaaaaaggccgcgttgctggcgtttttccataggctccgcccccctgacgagcatcacaaaaatcgacgctcaagtcagaggtggcgaaacccgacaggactataaagataccaggcgtttccccctggaagctccctcgtgcgctctcctgttccgaccctgccgcttaccggatacctgtccgcctttctcccttcgggaagcgtggcgctttctcatagctcacgctgtaggtatctcagttcggtgtaggtcgttcgctccaagctgggctgtgtgcacgaaccccccgttcagcccgaccgctgcgccttatccggtaactatcgtcttgagtccaacccggtaagacacgacttatcgccactggcagcagccactggtaacaggattagcagagcgaggtatgtaggcggtgctacagagttcttgaagtggtggcctaactacggctacactagaagaacagtatttggtatctgcgctctgctgaagccagttaccttcggaaaaagagttggtagctcttgatccggcaaacaaaccaccgctggtagcggtttttttgtttgcaagcagcagattacgcgcagaaaaaaaggatctcaagaagatcctttgatcttttctacggggtctgacgctcagtggaacgaaaactcacgttaagggattttggtcatgagattatcaaaaaggatcttcacctagatccttttaaattaaaaatgaagttttaaatcaatctaaagtatatatgagtaaacttggtctgacagttaccaatgcttaatcagtgaggcacctatctcagcgatctgtctatttcgttcatccatagttgcctgactccccgtcgtgtagataactacgatacgggagggcttaccatctggccccagtgctgcaatgataccgcgagacccacgctcaccggctccagatttatcagcaataaaccagccagccggaagggccgagcgcagaagtggtcctgcaactttatccgcctccatccagtctattaattgttgccgggaagctagagtaagtagttcgccagttaatagtttgcgcaacgttgttgccattgctacaggcatcgtggtgtcacgctcgtcgtttggtatggcttcattcagctccggttcccaacgatcaaggcgagttacatgatcccccatgttgtgcaaaaaagcggttagctccttcggtcctccgatcgttgtcagaagtaagttggccgcagtgttatcactcatggttatggcagcactgcataattctcttactgtcatgccatccgtaagatgcttttctgtgactggtgagtactcaaccaagtcattctgagaatagtgtatgcggcgaccgagttgctcttgcccggcgtcaatacgggataataccgcgccacatagcagaactttaaaagtgctcatcattggaaaacgttcttcggggcgaaaactctcaaggatcttaccgctgttgagatccagttcgatgtaacccactcgtgcacccaactgatcttcagcatcttttactttcaccagcgtttctgggtgagcaaaaacaggaaggcaaaatgccgcaaaaaagggaataagggcgacacggaaatgttgaatactcatactcttcctttttcaatattattgaagcatttatcagggttattgtctcatgagcggatacatatttgaatgtatttagaaaaataaacaaataggggttccgcgcacatttccccgaaaagtgccacctgacgtcgacggatcgggagatctcccgatcccctatggtgcactctcagtacaatctgctctgatgccgcatagttaagccagtatctgctccctgcttgtgtgttggaggtcgctgagtagtgcgcgagcaaaatttaagctacaacaaggcaaggcttgaccgacaattgcatgaagaatctgcttagggttaggcgttttgcgctgcttcgcgatgtacgggccagatatacgcgttgacattgattattgactagttattaatagtaatcaattacggggtcattagttcatagcccatatatggagttccgcgttacataacttacggtaaatggcccgcctggctgaccgcccaacgacccccgcccattgacgtcaataatgacgtatgttcccatagtaacgccaatagggactttccattgacgtcaatgggtggagtatttacggtaaactgcccacttggcagtacatcaagtgtatcatatgccaagtacgccccctattgacgtcaatgacggtaaatggcccgcctggcattatgcccagtacatgaccttatgggactttcctacttggcagtacatctacgtattagtcatcgctattaccatggtgatgcggttttggcagtacatcaatgggcgtggatagcggtttgactcacggggatttccaagtctccaccccattgacgtcaatgggagtttgttttggcaccaaaatcaacgggactttccaaaatgtcgtaacaactccgccccattgacgcaaatgggcggtaggcgtgtacggtgggaggtctatataagcagagctctctggctaactagagaacccactgcttactggcttatcgaaattaatacgactcactatagggagacccaagctggctagcgtttaaacttaagcttggtaccgagctcggatccgccaccatgggcatcgtggccatcaagatcaagctgaagcccaccaaggagcaggaggtgctgttctggaagtctgccggcgtggcccggtggtcctacaactacttcctgagcgagagcgagagacactaccaggagtaccttgaaggcaagcaggacaagaaaacaatcaaggaatccgaggtgcggaaatatatcaacaacgtgctgaagaaaaccacccacacctggctggaagaggtcggcagcaacgtgatgaagcaggctgtgaaggacgccgacatcgccagaaagaggtggtttgacggcgtggctaacaagcccaagttcaagtccaaaagaaagagcaaggtgtccttttacgtgaactacgagagcctgaagagaacaaacaatggcttcagaggcgaaaagatcggagttgtgaaaacctaccaagccctgcctaagctgaagaaaggcgagaagtactctaatcctagaattagcttcgatggcatgaactggttcatcagcatcggctacaacaacgagttcaaggctgtgaagctgactgatgtcagcctgggcatcgacgtgggcattaaggaactggctgtgtgcagcgatggacagttcaaaaaaaacatcaacaagacaaagcgcgtgcggttcctggaaaagaagctgaaaagagagcagagaaaaatcagccacaagctggaggccaacatcaagagctacgacaagaaccggaagccaatctacaagcggcctctgcgggacatgaaaaacattcagaagcagaacagaatcatcagaaacctgtataaaaagctggaaaacatcagaaccaactacctgcaccagtgcagcaatgagatcgtgaaaaccaagcctagcagaatcgtgatggaaacactgaatatcaagggaatgatgaaaaacaagcatctgtctaaggccatcgccaaccagaaactgtacgagtttaagagacagatccaatacaagtgcaagaagtacggcatcaagttcgtggaagccgataagtggtatccttcttctaagacctgttcgtgctgcggccaggtgaagtctgacctgaagctgaaggacagactgtacgtctgtaattgcggactgaaaatggacagagatctgaacgccagcatcaacctggccaattatcaaatccagagcgccggcagcggctccggaaaacggacagccgacggaagcgagttcgagtcaccgaaaaagaagcgaaaagtttaatctagagggcccgtttaaacccgctgatcagcctcgactgtgccttctagttgccagccatctgttgtttgcccctcccccgtgccttccttgaccctggaaggtgccactcccactgtcctttcctaataaaatgaggaaattgcatcgcattgtctgagtaggtgtcattctattctggggggtggggtggggcaggacagcaagggggaggattgggaagacaatagcaggcatgctggggatgcggtgggctctatggcttctgaggcggaaagaaccagctggggctctagggggtatccccacgcgccctgtagcggcgcattaagcgcggcgggtgtggtggttacgcgcagcgtgaccgctacacttgccagcgccctagcgcccgctcctttcgctttcttcccttcctttctcgccacgttcgccggctttccccgtcaagctctaaatcgggggctccctttagggttccgatttagtgctttacggcacctcgaccccaaaaaacttgattagggtgatggttcacgtagtgggccatcgccctgatagacggtttttcgccctttgacgttggagtccacgttctttaatagtggactcttgttccaaactggaacaacactcaaccctatctcggtctattcttttgatttataagggattttgccgatttcggcctattggttaaaaaatgagctgatttaacaaaaatttaacgcgaattaattctgtggaatgtgtgtcagttagggtgtggaaagtccccaggctccccagcaggcagaagtatgcaaagcatgcatctcaattagtca

SEQ ID NO: 198 - DNA, 4097 bp, synthetic construct
  source 1..4097: mol_type = other DNA
ctcatgagcggatacatatttgaatgtatttagaaaaataaacaaataggggttccgcgcacatttccccgaaaagtgccacctgatgcggtgtgaaataccgcacagatgcgtaaggagaaaataccgcatcaggaaattgtaagcgttaataattcagaagaactcgtcaagaaggcgatagaaggcgatgcgctgcgaatcgggagcggcgataccgtaaagcacgaggaagcggtcagcccattcgccgccaagctcttcagcaatatcacgggtagccaacgctatgtcctgatagcggtccgccacacccagccggccacagtcgatgaatccagaaaagcggccattttccaccatgatattcggcaagcaggcatcgccatgggtcacgacgagatcctcgccgtcgggcatgctcgccttgagcctggcgaacagttcggctggcgcgagcccctgatgctcttcgtccagatcatcctgatcgacaagaccggcttccatccgagtacgtgctcgctcgatgcgatgtttcgcttggtggtcgaatgggcaggtagccggatcaagcgtatgcagccgccgcattgcatcagccatgatggatactttctcggcaggagcaaggtgagatgacaggagatcctgccccggcacttcgcccaatagcagccagtcccttcccgcttcagtgacaacgtcgagcacagctgcgcaaggaacgcccgtcgtggccagccacgatagccgcgctgcctcgtcttgcagttcattcagggcaccggacaggtcggtcttgacaaaaagaaccgggcgcccctgcgctgacagccggaacacggcggcatcagagcagccgattgtctgttgtgcccagtcatagccgaatagcctctccacccaagcggccggagaacctgcgtgcaatccatcttgttcaatcatgcgaaacgatcctcatcctgtctcttgatcagagcttgatcccctgcgccatcagatccttggcggcaagaaagccatccagtttactttgcagggcttcccaaccttaccagagggcgccccagctggcaattccggttcgcttgctgtccataaaaccgcccagtctagctatcgccatgtaagcccactgcaagctacctgctttctctttgcgcttgcgttttcccttgtccagatagcccagtagctgacattcatccggggtcagcaccgtttctgcggactggctttctacgtgaaaaggatctaggtgaagatcctttttgataatctcatgcctgacatttatattccccagaacatcaggttaatggcgtttttgatgtcattttcgcggtggctgagatcagccacttcttccccgataacggagaccggcacactggccatatcggtggtcatcatgcgccagctttcatccccgatatgcaccaccgggtaaagttcacgggagactttatctgacagcagacgtgcactggccagggggatcaccatccgtcgccccggcgtgtcaataatatcactctgtacatccacaaacagacgataacggctctctcttttataggtgtaaaccttaaactgccgtacgtataggctgcgcaactgttgggaagggcgatcggtgcgggcctcttcgctattacgccagctggcgaaagggggatgtgctgcaaggcgattaagttgggtaacgccagggttttcccagtcacgacgttgtaaaacgacggccagtgaattgtaatacgactcactatagggcgaattgggccctctagatgcatgctcgagcggccgccagtgtgatggatatctgcagaattcgccctttgtacaaaaaagcaggctttaaaggaaccaattcagtcgactggatccggtaccaaggtcgggcaggaagagggcctatttcccatgattccttcatatttgcatatacgatacaaggctgttagagagataattagaattaatttgactgtaaacacaaagatattagtacaaaatacgtgacgtagaaagtaataatttcttgggtagtttgcagttttaaaattatgttttaaaatggactatcatatgcttaccgtaacttgaaagtatttcgatttcttggctttatatatcttgtggaaaggacgaaacaccgaattaccaaattcaaagtgcttaacctaaactaagctttgaatatgtacgtaacgatactacggaatttaagcctgttaagagtcatatcaaatggtagtagctttggcaaacccagattcgttgaagcaggaagacacaagacgaaaatcataagacataagtcgtgtcatagtataaatgtctacatttaaatagaaatgtatatatttttcgtatcgggcttttctgtcaccaatccggccggcatggtcccagcctcctcgctggcgccggctgggcaacatgcttcggcatggcgaatgggactttttttaagcttgatgcatagcttgagtattctatagtgtcacctaaatagcttggcgtaatcatggtcatagctgtttcctgtgtgaaattgttatccgctcacaattccacacaacatacgagccggaagcataaagtgtaaagcctggggtgcctaatgagtgagctaactcacattaattgcgttgcgctcactgcccgctttccagtcgggaaacctgtcgtgccagctgcattaatgaatcggccaacgcgcggggagaggcggtttgcgtattgggcgctcttccgcttcctcgctcactgactcgctgcgctcggtcgttcggctgcggcgagcggtatcagctcactcaaaggcggtaatacggttatccacagaatcaggggataacgcaggaaagaacatgtgagcaaaaggccagcaaaaggccaggaaccgtaaaaaggccgcgttgctggcgtttttccataggctccgcccccctgacgagcatcacaaaaatcgacgctcaagtcagaggtggcgaaacccgacaggactataaagataccaggcgtttccccctggaagctccctcgtgcgctctcctgttccgaccctgccgcttaccggatacctgtccgcctttctcccttcgggaagcgtggcgctttctcatagctcacgctgtaggtatctcagttcggtgtaggtcgttcgctccaagctgggctgtgtgcacgaaccccccgttcagcccgaccgctgcgccttatccggtaactatcgtcttgagtccaacccggtaagacacgacttatcgccactggcagcagccactggtaacaggattagcagagcgaggtatgtaggcggtgctacagagttcttgaagtggtggcctaactacggctacactagaagaacagtatttggtatctgcgctctgctgaagccagttaccttcggaaaaagagttggtagctcttgatccggcaaacaaaccaccgctggtagcggtggtttttttgtttgcaagcagcagattacgcgcagaaaaaaaggatctcaagaagatcctttgatcttttctacggggtctgacgctcagtggaacgaaaactcacgttaagggattttggtcatgagattatcaaaaaggatcttcacctagatccttttaaattaaaaatgaagttttagcacgtgtcagtcctgctcctcggccacgaagtgcacgcagttgccggccgggtcgcgcagggcgaactcccgcccccacggctgctcgccgatctcggtcatggccggcccggaggcgtcccggaagttcgtggacacgacctccgaccactcggcgtacagctcgtccaggccgcgcacccacacccaggccagggtgttgtccggcaccacctggtcctggaccgcgctgatgaacagggtcacgtcgtcccggaccacaccggcgaagtcgtcctccacgaagtcccgggagaacccgagccggtcggtccagaactcgaccgctccggcgacgtcgcgcgcggtgagcaccggaacggcactggtcaacttggccatggtggccctcctcacgtgctattattgaagcatttatcagggttattgt

SEQ ID NO: 199 - DNA, 4447 bp, synthetic construct
  source 1..4447: mol_type = other DNA
agtcagccccatacgatataagttgtaattctcatgttagtcatgccccgcgcccaccggaaggagctgactgggttgaaggctctcaagggcatcggtcgagatcccggtgcctaatgagtgagctaacttacattaattgcgttgcgctcactgcccgctttccagtcgggaaacctgtcgtgccagctgcattaatgaatcggccaacgcgcggggagaggcggtttgcgtattgggcgccagggtggtttttcttttcaccagtgagacgggcaacagctgattgcccttcaccgcctggccctgagagagttgcagcaagcggtccacgctggtttgccccagcaggcgaaaatcctgtttgatggtggttaacggcgggatataacatgagctgtcttcggtatcgtcgtatcccactaccgagatgtccgcaccaacgcgcagcccggactcggtaatggcgcgcattgcgcccagcgccatctgatcgttggcaaccagcatcgcagtgggaacgatgccctcattcagcatttgcatggtttgttgaaaaccggacatggcactccagtcgccttcccgttccgctatcggctgaatttgattgcgagtgagatatttatgccagccagccagacgcagacgcgccgagacagaacttaatgggcccgctaacagcgcgatttgctggtgacccaatgcgaccagatgctccacgcccagtcgcgtaccgtcttcatgggagaaaataatactgttgatgggtgtctggtcagagacatcaagaaataacgccggaacattagtgcaggcagcttccacagcaatggcatcctggtcatccagcggatagttaatgatcagcccactgacgcgttgcgcgagaagattgtgcaccgccgctttacaggcttcgacgccgcttcgttctaccatcgacaccaccacgctggcacccagttgatcggcgcgagatttaatcgccgcgacaatttgcgacggcgcgtgcagggccagactggaggtggcaacgccaatcagcaacgactgtttgcccgccagttgttgtgccacgcggttgggaatgtaattcagctccgccatcgccgcttccactttttcccgcgttttcgcagaaacgtggctggcctggttcaccacgcgggaaacggtctgataagagacaccggcatactctgcgacatcgtataacgttactggtttcacattcaccaccctgaattgactctcttccgggcgctatcatgccataccgcgaaaggttttgcgccattcgatggtgtccgggagaaattaatacgactcactataggcctcgagttaactaaagggaattttcccttgagtaaatattttatagaatcaacttacaaggataaaagtggtaaagaaaacaaatgctatttgctaactaagatgggtaattaaactgttataacaaatctaaacaaaactatacaaatatgtatagaaaaatagatatcccagcggtcaaaacaggcggcagtaaggcggtcgggatagttttcttgcggccctaatccgagccagtttacccgctctgctacctgcgccagctggcagttcaggccaatccgcgccggatgcggtgtatcgctcgccacttcaacatcaacggtaatcgccatttgaccactaccatcaatccggtaggttttccggctgataaataaggttttcccctgatgctgccacgcgtgagcggtcgtaatcagcaccgcatcagcaagtgtatctgccgtgcactgcaacaacgctgcttcggcctggtaatggcccgccgccttccagcgttcgacccaggcgttagggtcaatgcgggtcgcttcacttacgccaatgtcgttatccagcggtgcacgggtgaactgatcgcgcagcggcgtcagcagttgttttttatcgccaatccacatctgtgaaagaaagcctgactggcggttaaattgccaacgcttattacccagctcgatgcaaaaatccatttcgctggtggtcagatgcgggatggcgtgggacgcggcggggagcgtcacactgaggttttccgccagacgccactgctgccaggcgctgatgtgcccggcttctgaccatgcggtcgcgttcggttgcactacgcgtactgtgagccagagttgcccggcgctctccggctgcggtagttcaggcagttcaatcaactgtttaccttgtggagcgacatccagaggcacttcaccgcttgccagcggcttaccatccagcgccaccatccagtagtcgtgtcatagtataaatgtctacatttaaatagaaatgtatatatttttcgtatcggttgtgaatttttagccaataaatttaatggtgaaaaagggatactatttactgctaaatatgttgaaagatttaatgaaatggaagagaaacagaatcaagcgcctaggctgctgccaccgctgagcaataactagcataaccccttggggcctctaaacgggtcttgaggggttttttgctgaaacctcaggcatttgagaagcacacggtcacactgcttccggtagtcaataaaccggtaaaccagcaatagacataagcggctatttaacgaccctgccctgaaccgacgaccgggtcatcgtggccggatcttgcggcccctcggcttgaacgaattgttagacattatttgccgactaccttggtgatctcgcctttcacgtagtggacaaattcttccaactgatctgcgcgcgaggccaagcgatcttcttcttgtccaagataagcctgtctagcttcaagtatgacgggctgatactgggccggcaggcgctccattgcccagtcggcagcgacatccttcggcgcgattttgccggttactgcgctgtaccaaatgcgggacaacgtaagcactacatttcgctcatcgccagcccagtcgggcggcgagttccatagcgttaaggtttcatttagcgcctcaaatagatcctgttcaggaaccggatcaaagagttcctccgccgctggacctaccaaggcaacgctatgttctcttgcttttgtcagcaagatagccagatcaatgtcgatcgtggctggctcgaagatacctgcaagaatgtcattgcgctgccattctccaaattgcagttcgcgcttagctggataacgccacggaatgatgtcgtcgtgcacaacaatggtgacttctacagcgcggagaatctcgctctctccaggggaagccgaagtttccaaaaggtcgttgatcaaagctcgccgcgttgtttcatcaagccttacggtcaccgtaaccagcaaatcaatatcactgtgtggcttcaggccgccatccactgcggagccgtacaaatgtacggccagcaacgtcggttcgagatggcgctcgatgacgccaactacctctgatagttgagtcgatacttcggcgatcaccgcttccctcatactcttcctttttcaatattattgaagcatttatcagggttattgtctcatgagcggatacatatttgaatgtatttagaaaaataaacaaatagctagctcactcggtcgctacgctccgggcgtgagactgcggcgggcgctgcggacacatacaaagttacccacagattccgtggataagcaggggactaacatgtgaggcaaaacagcagggccgcgccggtggcgtttttccataggctccgccctcctgccagagttcacataaacagacgcttttccggtgcatctgtgggagccgtgaggctcaaccatgaatctgacagtacgggcgaaacccgacaggacttaaagatccccaccgtttccggcgggtcgctccctcttgcgctctcctgttccgaccctgccgtttaccggatacctgttccgcctttctcccttacgggaagtgtggcgctttctcatagctcacacactggtatctcggctcggtgtaggtcgttcgctccaagctgggctgtaagcaagaactccccgttcagcccgactgctgcgccttatccggtaactgttcacttgagtccaacccggaaaagcacggtaaaacgccactggcagcagccattggtaactgggagttcgcagaggatttgtttagctaaacacgcggttgctcttgaagtgtgcgccaaagtccggctacactggaaggacagatttggttgctgtgctctgcgaaagccagttaccacggttaagcagttccccaactgacttaaccttcgatcaaaccacctccccaggtggttttttcgtttacagggcaaaagattacgcgcagaaaaaaaggatctcaagaagatcctttgatcttttctactgaaccgctctagatttcagtgcaatttatctcttcaaatgtagcacctga

SEQ ID NO: 200 - DNA, 4128 bp, synthetic construct
  source 1..4128: mol_type = other DNA
gatacttcggcgatcaccgcttccctcatactcttcctttttcaatattattgaagcatttatcagggttattgtctcatgagcggatacatatttgaatgtatttagaaaaataaacaaatagctagctcactcggtcgctacgctccgggcgtgagactgcggcgggcgctgcggacacatacaaagttacccacagattccgtggataagcaggggactaacatgtgaggcaaaacagcagggccgcgccggtggcgtttttccataggctccgccctcctgccagagttcacataaacagacgcttttccggtgcatctgtgggagccgtgaggctcaaccatgaatctgacagtacgggcgaaacccgacaggacttaaagatccccaccgtttccggcgggtcgctccctcttgcgctctcctgttccgaccctgccgtttaccggatacctgttccgcctttctcccttacgggaagtgtggcgctttctcatagctcacacactggtatctcggctcggtgtaggtcgttcgctccaagctgggctgtaagcaagaactccccgttcagcccgactgctgcgccttatccggtaactgttcacttgagtccaacccggaaaagcacggtaaaacgccactggcagcagccattggtaactgggagttcgcagaggatttgtttagctaaacacgcggttgctcttgaagtgtgcgccaaagtccggctacactggaaggacagatttggttgctgtgctctgcgaaagccagttaccacggttaagcagttccccaactgacttaaccttcgatcaaaccacctccccaggtggttttttcgtttacagggcaaaagattacgcgcagaaaaaaaggatctcaagaagatcctttgatcttttctactgaaccgctctagatttcagtgcaatttatctcttcaaatgtagcacctgaagtcagccccatacgatataagttgtaattctcatgttagtcatgccccgcgcccaccggaaggagctgactgggttgaaggctctcaagggcatcggtcgagatcccggtgcctaatgagtgagctaacttacattaattgcgttgcgctcactgcccgctttccagtcgggaaacctgtcgtgccagctgcattaatgaatcggccaacgcgcggggagaggcggtttgcgtattgggcgccagggtggtttttcttttcaccagtgagacgggcaacagctgattgcccttcaccgcctggccctgagagagttgcagcaagcggtccacgctggtttgccccagcaggcgaaaatcctgtttgatggtggttaacggcgggatataacatgagctgtcttcggtatcgtcgtatcccactaccgagatgtccgcaccaacgcgcagcccggactcggtaatggcgcgcattgcgcccagcgccatctgatcgttggcaaccagcatcgcagtgggaacgatgccctcattcagcatttgcatggtttgttgaaaaccggacatggcactccagtcgccttcccgttccgctatcggctgaatttgattgcgagtgagatatttatgccagccagccagacgcagacgcgccgagacagaacttaatgggcccgctaacagcgcgatttgctggtgacccaatgcgaccagatgctccacgcccagtcgcgtaccgtcttcatgggagaaaataatactgttgatgggtgtctggtcagagacatcaagaaataacgccggaacattagtgcaggcagcttccacagcaatggcatcctggtcatccagcggatagttaatgatcagcccactgacgcgttgcgcgagaagattgtgcaccgccgctttacaggcttcgacgccgcttcgttctaccatcgacaccaccacgctggcacccagttgatcggcgcgagatttaatcgccgcgacaatttgcgacggcgcgtgcagggccagactggaggtggcaacgccaatcagcaacgactgtttgcccgccagttgttgtgccacgcggttgggaatgtaattcagctccgccatcgccgcttccactttttcccgcgttttcgcagaaacgtggctggcctggttcaccacgcgggaaacggtctgataagagacaccggcatactctgcgacatcgtataacgttactggtttcacattcaccaccctgaattgactctcttccgggcgctatcatgccataccgcgaaaggttttgcgccattcgatggtgtccgggagaaattaatacgactcactataggcctcgagttaactaaagggaattttcccttgagtaaatattttatagaatcaacttacaaggataaaagtggtaaagaaaacaaatgctatttgctaactaagatgggtaattaaactgttataacaaatctaaacaaaactatacaaatatgtatagaaaaatagatttataacaggaagccctgtgtatcatgtgaatggtgcatactcggtgttaattgcttttaactcctaaagccttacaaccaaagcgaagttggaaacgacaagcgtaacggtgcgaaagctgaaaaaatagtaaggatggcataagctgaaataaaatccaattaggttctataaaagggtggtcgtgacatatagaaaacgttgggtgctaaatgctgtaataatggatgtttagcagggaaattcctaagtcttttaagatatggaagaccttcaacgactatctccttgagggagagtaaagccacaagccaacggtggaagaaaaataccgcatctcttttgagatgaagatatagtctacgctcatatgaaagtatgagaggtctactcgtgagagaaagactgctataggtgttgcgacctatagtgaataagaaaaatatatacaaatataaaaaatattgacatatctctctaaaaagtgtaatatattattatactaaagggaggtgagtacgtatatatttttcgtatcggttgtgaatttttagccaataaatttaatggtgaaaaagggatactatttactgctaaatatgttgaaagatttaatgaaatggaagagaaacagaatcaagcgcctaggctgctgccaccgctgagcaataactagcataaccccttggggcctctaaacgggtcttgaggggttttttgctgaaacctcaggcatttgagaagcacacggtcacactgcttccggtagtcaataaaccggtaaaccagcaatagacataagcggctatttaacgaccctgccctgaaccgacgaccgggtcatcgtggccggatcttgcggcccctcggcttgaacgaattgttagacattatttgccgactaccttggtgatctcgcctttcacgtagtggacaaattcttccaactgatctgcgcgcgaggccaagcgatcttcttcttgtccaagataagcctgtctagcttcaagtatgacgggctgatactgggccggcaggcgctccattgcccagtcggcagcgacatccttcggcgcgattttgccggttactgcgctgtaccaaatgcgggacaacgtaagcactacatttcgctcatcgccagcccagtcgggcggcgagttccatagcgttaaggtttcatttagcgcctcaaatagatcctgttcaggaaccggatcaaagagttcctccgccgctggacctaccaaggcaacgctatgttctcttgcttttgtcagcaagatagccagatcaatgtcgatcgtggctggctcgaagatacctgcaagaatgtcattgcgctgccattctccaaattgcagttcgcgcttagctggataacgccacggaatgatgtcgtcgtgcacaacaatggtgacttctacagcgcggagaatctcgctctctccaggggaagccgaagtttccaaaaggtcgttgatcaaagctcgccgcgttgtttcatcaagccttacggtcaccgtaaccagcaaatcaatatcactgtgtggcttcaggccgccatccactgcggagccgtacaaatgtacggccagcaacgtcggttcgagatggcgctcgatgacgccaactacctctgatagttgagtc

SEQ ID NO: 201 - DNA, 4124 bp, synthetic construct
  source 1..4124: mol_type = other DNA
gatacttcggcgatcaccgcttccctcatactcttcctttttcaatattattgaagcatttatcagggttattgtctcatgagcggatacatatttgaatgtatttagaaaaataaacaaatagctagctcactcggtcgctacgctccgggcgtgagactgcggcgggcgctgcggacacatacaaagttacccacagattccgtggataagcaggggactaacatgtgaggcaaaacagcagggccgcgccggtggcgtttttccataggctccgccctcctgccagagttcacataaacagacgcttttccggtgcatctgtgggagccgtgaggctcaaccatgaatctgacagtacgggcgaaacccgacaggacttaaagatccccaccgtttccggcgggtcgctccctcttgcgctctcctgttccgaccctgccgtttaccggatacctgttccgcctttctcccttacgggaagtgtggcgctttctcatagctcacacactggtatctcggctcggtgtaggtcgttcgctccaagctgggctgtaagcaagaactccccgttcagcccgactgctgcgccttatccggtaactgttcacttgagtccaacccggaaaagcacggtaaaacgccactggcagcagccattggtaactgggagttcgcagaggatttgtttagctaaacacgcggttgctcttgaagtgtgcgccaaagtccggctacactggaaggacagatttggttgctgtgctctgcgaaagccagttaccacggttaagcagttccccaactgacttaaccttcgatcaaaccacctccccaggtggttttttcgtttacagggcaaaagattacgcgcagaaaaaaaggatctcaagaagatcctttgatcttttctactgaaccgctctagatttcagtgcaatttatctcttcaaatgtagcacctgaagtcagccccatacgatataagttgtaattctcatgttagtcatgccccgcgcccaccggaaggagctgactgggttgaaggctctcaagggcatcggtcgagatcccggtgcctaatgagtgagctaacttacattaattgcgttgcgctcactgcccgctttccagtcgggaaacctgtcgtgccagctgcattaatgaatcggccaacgcgcggggagaggcggtttgcgtattgggcgccagggtggtttttcttttcaccagtgagacgggcaacagctgattgcccttcaccgcctggccctgagagagttgcagcaagcggtccacgctggtttgccccagcaggcgaaaatcctgtttgatggtggttaacggcgggatataacatgagctgtcttcggtatcgtcgtatcccactaccgagatgtccgcaccaacgcgcagcccggactcggtaatggcgcgcattgcgcccagcgccatctgatcgttggcaaccagcatcgcagtgggaacgatgccctcattcagcatttgcatggtttgttgaaaaccggacatggcactccagtcgccttcccgttccgctatcggctgaatttgattgcgagtgagatatttatgccagccagccagacgcagacgcgccgagacagaacttaatgggcccgctaacagcgcgatttgctggtgacccaatgcgaccagatgctccacgcccagtcgcgtaccgtcttcatgggagaaaataatactgttgatgggtgtctggtcagagacatcaagaaataacgccggaacattagtgcaggcagcttccacagcaatggcatcctggtcatccagcggatagttaatgatcagcccactgacgcgttgcgcgagaagattgtgcaccgccgctttacaggcttcgacgccgcttcgttctaccatcgacaccaccacgctggcacccagttgatcggcgcgagatttaatcgccgcgacaatttgcgacggcgcgtgcagggccagactggaggtggcaacgccaatcagcaacgactgtttgcccgccagttgttgtgccacgcggttgggaatgtaattcagctccgccatcgccgcttccactttttcccgcgttttcgcagaaacgtggctggcctggttcaccacgcgggaaacggtctgataagagacaccggcatactctgcgacatcgtataacgttactggtttcacattcaccaccctgaattgactctcttccgggcgctatcatgccataccgcgaaaggttttgcgccattcgatggtgtccgggagaaattaatacgactcactataggcctcgagttaactaaagggaattttcccttgagtaaatattttatagaatcaacttacaaggataaaagtggtaaagaaaacaaatgctatttgctaactaagatgggtaattaaactgttataacaaatctaaacaaaactatacaaatatgtatagaaaaatagatttataacaggaagccctgtgtatcatgtgaatggtgcatactcggtgttaattgcttttaactcctaaagccttacaaccaaagcgaagttggaaacgacaagcgtaacggtgcgaaagctgaaaaaatagtaaggatggcataagctgaaataaaatccaattaggttctataaaagggtggtcgtgacatatagaaaacgttgggtgctaaatgctgtaataatggatgtttagcagggaaattcctaagtcttttaagatatggaagaccttcaacgactatctccttgagggagagtaaagccacaagccaacggtggaagaaaaataccgcatctcttttgagatgaagatatagtctacgctcatatgaaagtatgagaggtctactcgtgagagaaagactgctataggtgttgcgacctatagtgaataagaaaaatatatacaaatataaaaaatattgacatatctctctaaaaagtgtaatatattattatactaaagggaggtgagtacatatttttcgtatcggttgtgaatttttagccaataaatttaatggtgaaaaagggatactatttactgctaaatatgttgaaagatttaatgaaatggaagagaaacagaatcaagcgcctaggctgctgccaccgctgagcaataactagcataaccccttggggcctctaaacgggtcttgaggggttttttgctgaaacctcaggcatttgagaagcacacggtcacactgcttccggtagtcaataaaccggtaaaccagcaatagacataagcggctatttaacgaccctgccctgaaccgacgaccgggtcatcgtggccggatcttgcggcccctcggcttgaacgaattgttagacattatttgccgactaccttggtgatctcgcctttcacgtagtggacaaattcttccaactgatctgcgcgcgaggccaagcgatcttcttcttgtccaagataagcctgtctagcttcaagtatgacgggctgatactgggccggcaggcgctccattgcccagtcggcagcgacatccttcggcgcgattttgccggttactgcgctgtaccaaatgcgggacaacgtaagcactacatttcgctcatcgccagcccagtcgggcggcgagttccatagcgttaaggtttcatttagcgcctcaaatagatcctgttcaggaaccggatcaaagagttcctccgccgctggacctaccaaggcaacgctatgttctcttgcttttgtcagcaagatagccagatcaatgtcgatcgtggctggctcgaagatacctgcaagaatgtcattgcgctgccattctccaaattgcagttcgcgcttagctggataacgccacggaatgatgtcgtcgtgcacaacaatggtgacttctacagcgcggagaatctcgctctctccaggggaagccgaagtttccaaaaggtcgttgatcaaagctcgccgcgttgtttcatcaagccttacggtcaccgtaaccagcaaatcaatatcactgtgtggcttcaggccgccatccactgcggagccgtacaaatgtacggccagcaacgtcggttcgagatggcgctcgatgacgccaactacctctgatagttgagtc

SEQ ID NO: 202 - DNA, 22 bp, synthetic construct
  source 1..22: mol_type = other DNA
tgggttgtgaatttttagccaa

SEQ ID NO: 203 - DNA, 22 bp, synthetic construct
  source 1..22: mol_type = other DNA
tgggattcatgatttcattagg

SEQ ID NO: 204 - DNA, 76 bp, synthetic construct
  source 1..76: mol_type = other DNA
tttatcttaattaggcgagaagactcccacttcaacgaagcggagtaagtgggagatgaatcgccttaactatatt

SEQ ID NO: 205 - DNA, 62 bp, synthetic construct
  source 1..62: mol_type = other DNA
tctttggaagcccccacttcaaattttcgctagaaaattaagtgggggtagttcacnnnnnn

SEQ ID NO: 206 - DNA, 20 bp, synthetic construct
  source 1..20: mol_type = other DNA
aaaaatttaagctgatcgaa

SEQ ID NO: 207 - DNA, 20 bp, synthetic construct
  source 1..20: mol_type = other DNA
ttttttttatggacaagtgg

SEQ ID NO: 208 - DNA, 20 bp, synthetic construct
  source 1..20: mol_type = other DNA
gattttttaacggtcatttt

SEQ ID NO: 209 - DNA, 20 bp, synthetic construct
  source 1..20: mol_type = other DNA
ggcgcttcatgagcgcaccg

SEQ ID NO: 210 - DNA, 20 bp, synthetic construct
  source 1..20: mol_type = other DNA
tgtttttcatcttccctaca

SEQ ID NO: 211 - DNA, 21 bp, synthetic construct
  source 1..21: mol_type = other DNA
tttatggacaagtggttcacc

SEQ ID NO: 212 - DNA, 21 bp, synthetic construct
  source 1..21: mol_type = other DNA
tttaacgctcattttcccgtg

SEQ ID NO: 213 - DNA, 21 bp, synthetic construct
  source 1..21: mol_type = other DNA
ttcatcgccgcccctcttgtt

SEQ ID NO: 214 - DNA, 21 bp, synthetic construct
  source 1..21: mol_type = other DNA
ttcatcttccctacacacaag

SEQ ID NO: 215 - DNA, 84 bp, synthetic construct
  source 1..84: mol_type = other DNA
aaggaaacctttaatttccctccgaaagaagtctcctacttctaaaggtgcgcaagtgggagatgaatggcgttagccaacgaa

SEQ ID NO: 216 - DNA, 75 bp, synthetic construct
  source 1..75: mol_type = other DNA
ttccctttttttaacataaatcagccagaagtcccccacctctaaggtgggggatgaattgtttttggcaatgaa

SEQ ID NO: 217 - DNA, 84 bp, synthetic construct
  source 1..84: mol_type = other DNA
gcggctttttttatcttaattaggcgagaagactcccacttcaaaagcggagtaagtgggagatgaatcgcctttgaaaatgga

SEQ ID NO: 218 - DNA, 83 bp, synthetic construct
  source 1..83: mol_type = other DNA
tttccctcattcatcttctttggcgaggagaccccgacttctaagcgagagcaagtcggggaggaatcgcccttaacaattac

SEQ ID NO: 219 - DNA, 84 bp, synthetic construct
  source 1..84: mol_type = other DNA
tcccacatgttcatcctatttcgcgcaggagactcccacttcaaaaagggagtaagtgggagaggaatcgcgttgtatgatgaa

SEQ ID NO: 220 - DNA, 87 bp, synthetic construct
  source 1..87: mol_type = other DNA
agcgtaaaggggtgtgtggcttaccgttcgagcttgaagccttcacctctagcgaagcgtaggtgggggtagttcacaacggagatg

SEQ ID NO: 221 - DNA, 84 bp, synthetic construct
  source 1..84: mol_type = other DNA
acacgggaaatgtatcgtgaaacacccagcaagaaacccccacttcaagcctacagtaagtgggggaggttcatcgccgagtat

SEQ ID NO: 222 - DNA, 83 bp, synthetic construct
  source 1..83: mol_type = other DNA
agaataaggatgaagcagtcaaacttctttggaagcccccacttcaatagaaaattaagtgggggtagttcacgccaaatgcc

SEQ ID NO: 223 - DNA, 80 bp, synthetic construct
  source 1..80: mol_type = other DNA
tggctgagggtagtcaactagggcttgccaagcccccacttcaaccgttagttaagtgggggtagttgactaatgggaat

SEQ ID NO: 224 - DNA, 88 bp, synthetic construct
  source 1..88: mol_type = other DNA
ggaaggaggacgaagtccgcttgtacttctagttgcaagcccccacttcaagcgttagctaagtgggggtagttgactgcattgtcgt

SEQ ID NO: 225 - DNA, 20 bp, synthetic construct
  source 1..20: mol_type = other DNA
ttttttttatggacaagtgg

SEQ ID NO: 226 - DNA, 74 bp, synthetic construct
  source 1..74: mol_type = other DNA
tctttggaagcccccacttcaaattttcgctagaaaattaagtgggggtagtttatggacaagtggttcaccat

SEQ ID NO: 227 - DNA, 20 bp, synthetic construct
  source 1..20: mol_type = other DNA
ttttttttatcatgcgttgc

SEQ ID NO: 228 - DNA, 20 bp, synthetic construct
  source 1..20: mol_type = other DNA
ccctgtttatcttcctgatg

SEQ ID NO: 229 - DNA, 20 bp, synthetic construct
  source 1..20: mol_type = other DNA
catcaggaagataaacaggg

SEQ ID NO: 230 - DNA, 20 bp, synthetic construct
  source 1..20: mol_type = other DNA
gcttttttatcccgccagcc

SEQ ID NO: 231 - DNA, 20 bp, synthetic construct
  source 1..20: mol_type = other DNA
ggctggcgggataaaaaagc

SEQ ID NO: 232 - DNA, 20 bp, synthetic construct
  source 1..20: mol_type = other DNA
tcccctttatccgtcagggg

SEQ ID NO: 233 - DNA, 20 bp, synthetic construct
  source 1..20: mol_type = other DNA
cccctgacggataaagggga

SEQ ID NO: 234 - DNA, 20 bp, synthetic construct
  source 1..20: mol_type = other DNA
acgtctttatcgaggatgac

SEQ ID NO: 235 - DNA, 20 bp, synthetic construct
  source 1..20: mol_type = other DNA
gtcatcctcgataaagacgt

SEQ ID NO: 236 - DNA, 35 bp, synthetic construct
  source 1..35: mol_type = other DNA
ttcatctgtggtgcaacgggcgctgggtcggttac

SEQ ID NO: 237 - DNA, 35 bp, synthetic construct
  source 1..35: mol_type = other DNA
ttcatctgtactgttgcgggcttgctggtaagaaa

SEQ ID NO: 238 - DNA, 35 bp, synthetic construct
  source 1..35: mol_type = other DNA
ttcatctgaacaacggcccacaggccgatcgactt

SEQ ID NO: 239 - DNA, 35 bp, synthetic construct
  source 1..35: mol_type = other DNA
ttcatctgtgaaaacggcgcttgaacttggttatc

SEQ ID NO: 240 - DNA, 35 bp, synthetic construct
  source 1..35: mol_type = other DNA
ttcatctgtgacctgcaaggcatcaggaaccggat

SEQ ID NO: 241 - DNA, 35 bp, synthetic construct
  source 1..35: mol_type = other DNA
tttatccgggcaaaccatcgaagtgaccagcgaat

SEQ ID NO: 242 - DNA, 35 bp, synthetic construct
  source 1..35: mol_type = other DNA
tttatctataaaactaactatataaataaccataa

SEQ ID NO: 243 - DNA, 35 bp, synthetic construct
  source 1..35: mol_type = other DNA
tttatctgataaaaaaatgccgacataacgtcggc

SEQ ID NO: 244 - DNA, 35 bp, synthetic construct
  source 1..35: mol_type = other DNA
tttatcgataaaggtcatctcgagccggttcaggg

SEQ ID NO: 245 - DNA, 35 bp, synthetic construct
  source 1..35: mol_type = other DNA
tttatcaaataaatcatcggcgtctttggccttat

SEQ ID NO: 246 - DNA, 23 bp, synthetic construct
  source 1..23: mol_type = other DNA
tgatttcagccgcgctgtactgg

SEQ ID NO: 247 - DNA, 23 bp, synthetic construct
  source 1..23: mol_type = other DNA
cgtccgttttccatctgtaccgg

SEQ ID NO: 248 - DNA, 23 bp, synthetic construct
  source 1..23: mol_type = other DNA
gcatggatagcgtgctgtaccgg

SEQ ID NO: 249 - DNA, 23 bp, synthetic construct
  source 1..23: mol_type = other DNA
gcgtacgccgaccccggtaccgg

SEQ ID NO: 250 - DNA, 23 bp, synthetic construct
  source 1..23: mol_type = other DNA
cacccgatgcggcgctgtactgg

SEQ ID NO: 251 - DNA, 30 bp, synthetic construct
  source 1..30: mol_type = other DNA
tttatccgggcaaaccatcgaagtgaccag

SEQ ID NO: 252 - DNA, 30 bp, synthetic construct
  source 1..30: mol_type = other DNA
tttatccgggctttttagcatcggtttatt

SEQ ID NO: 253 - DNA, 30 bp, synthetic construct
  source 1..30: mol_type = other DNA
tttgtccgggcactgttcgcgcaaggcttt

SEQ ID NO: 254 - DNA, 30 bp, synthetic construct
  source 1..30: mol_type = other DNA
tttatccgggcgaagaacacagtttccatt

SEQ ID NO: 255 - DNA, 30 bp, synthetic construct
  source 1..30: mol_type = other DNA
tttctccgggctaccgctttttacactaaa

SEQ ID NO: 256 - DNA, 37 bp, synthetic construct
  source 1..37: mol_type = other DNA
gaagnnnnnnggacaagtggttcaccatgcgttgctt

SEQ ID NO: 257 - DNA, 37 bp, synthetic construct
  source 1..37: mol_type = other DNA
aagcaacgcatggtgaaccacttgtccnnnnnncttc

SEQ ID NO: 258 - RNA, 28 nt, synthetic construct
  source 1..28: mol_type = other RNA
cgtatcgggacaagtggttcaccatgcg

SEQ ID NO: 259 - RNA, 24 nt, synthetic construct
  source 1..24: mol_type = other RNA
acactcgtgactttactcrtgagt

SEQ ID NO: 260 - RNA, 33 nt, synthetic construct
  source 1..33: mol_type = other RNA
cargaaycyygygacttyagtyrtgrgaggttc

SEQ ID NO: 261 - DNA, 54 bp, synthetic construct
  source 1..54: mol_type = other DNA
tttttagttcttgattaaaaccacggtcgcacactcgttgctttagctgtgagt

SEQ ID NO: 262 - DNA, 54 bp, synthetic construct
  source 1..54: mol_type = other DNA
cttgaagaatttgattaaaaatatggttgcaaacttgtgacttcggtcatgagt

SEQ ID NO: 263 - DNA, 54 bp, synthetic construct
  source 1..54: mol_type = other DNA
catagaataattgattaaaaccacggtcgcacactcgttgctttagctgtgagt

SEQ ID NO: 264 - DNA, 54 bp, synthetic construct
  source 1..54: mol_type = other DNA
tttataatttttgattaaaaatatggttgcatacttgtgacttcagtcatgagt

SEQ ID NO: 265 - DNA, 54 bp, synthetic construct
  source 1..54: mol_type = other DNA
agttccaaggttgattaaaaatatggtcgcacacttgtgacttcagtcatgagt

SEQ ID NO: 266 - DNA, 54 bp, synthetic construct
  source 1..54: mol_type = other DNA
acaacactatttgattaaaactacggttacacactcgtgactttatccatgagt

SEQ ID NO: 267 - DNA, 54 bp, synthetic construct
  source 1..54: mol_type = other DNA
aatggagaatttgattaaaaccacggtcgcacactcgttgctttagctgtgagt

SEQ ID NO: 268 - DNA, 53 bp, synthetic construct
  source 1..53: mol_type = other DNA
ggccctaatattgattaaatgggagccgcacactcgtgactttagtcgtgagt

SEQ ID NO: 269 - DNA, 53 bp, synthetic construct
  source 1..53: mol_type = other DNA
cctttattttttgattagacgtttggtgcacactcgtgacttcagtcgtgagt

SEQ ID NO: 270 - DNA, 49 bp, synthetic construct
  source 1..49: mol_type = other DNA
catgtctagttgattagtgaaccgcacacttgtgattttaatcatgagt

SEQ ID NO: 271 - DNA, 50 bp, synthetic construct
  source 1..50: mol_type = other DNA
ctacccaagaaccctgcgacttcagtcgtgggaggttcaggataccttat

SEQ ID NO: 272 - DNA, 51 bp, synthetic construct
  source 1..51: mol_type = other DNA
ttacccaagaaccccgtggactttagtcatgggaggttcagttcgatgata

SEQ ID NO: 273 - DNA, 50 bp, synthetic construct
  source 1..50: mol_type = other DNA
ttacccaagaaccctgtgacaccagtcgtgggaggttcagaagacttctg

SEQ ID NO: 274 - DNA, 50 bp, synthetic construct
  source 1..50: mol_type = other DNA
ttacccaagaaccccgtgactttagtcatgggaggttcagatgtttaaag

SEQ ID NO: 275 - DNA, 50 bp, synthetic construct
  source 1..50: mol_type = other DNA
ctacccaagaaccctgcgacttcagtcgtgggaggttcagaattgccata

SEQ ID NO: 276 - DNA, 50 bp, synthetic construct
  source 1..50: mol_type = other DNA
ttacccaagaaccccgcgacttcagttgtgggaggttcaggtagttgaaa

SEQ ID NO: 277 - DNA, 50 bp, synthetic construct
  source 1..50: mol_type = other DNA
ctacccaagaaccctgcgacttcagtcgtgggaggttcagaaagttgtaa

SEQ ID NO: 278 - DNA, 50 bp, synthetic construct
  source 1..50: mol_type = other DNA
tgaagcaggaaccccgcgactttagtcgtgggaggttcagtcagccatat

SEQ ID NO: 279 - DNA, 50 bp, synthetic construct
  source 1..50: mol_type = other DNA
gttcgcaggaacctcgtgacttcagtcatgagtagttcaggcatcatata

SEQ ID NO: 280 - DNA, 50 bp, synthetic construct
  source 1..50: mol_type = other DNA
ttgaccgagaaccccgcgactttagttgtgggaggttcaggagtgagagg

SEQ ID NO: 281 - protein, 10 aa, synthetic construct
EEEIQNPQFD

SEQ ID NO: 282 - protein, 10 aa, synthetic construct
NMKFYKKRME

SEQ ID NO: 283 - protein, 20 aa, synthetic construct
EEEIQNPQFDNMKFYKKRME

SEQ ID NO: 284 - protein, 10 aa, synthetic construct
VAFTRAKEKL

SEQ ID NO: 285 - protein, 10 aa, synthetic construct
ITGSTRNIQD

SEQ ID NO: 286 - protein, 21 aa, synthetic construct
VAFTRAKEKLIITGSTRNIQD

SEQ ID NO: 287 - DNA, 43 bp, synthetic construct
  source 1..43: mol_type = other DNA
ctagaggaagagattcaaaatcctcaatttgattaaaaaatag

SEQ ID NO: 288 - DNA, 43 bp, synthetic construct
  source 1..43: mol_type = other DNA
ggaggttcagaatatgaaattttacaaaaaaaggatggaattt

SEQ ID NO: 289 - DNA, 66 bp, synthetic construct
  source 1..66: mol_type = other DNA
ctagaggaagagattcaaaatcctcaatttgataatatgaaattttacaaaaaaaggatggaattt

SEQ ID NO: 290 - DNA, 45 bp, synthetic construct
  source 1..45: mol_type = other DNA
tatgttgcatttacaagagctaaagaaaaattgattaaaaaatat

SEQ ID NO: 291 - DNA, 44 bp, synthetic construct
  source 1..44: mol_type = other DNA
ggaggttcagtataactggttctactagaaatatacaagatagt

SEQ ID NO: 292 - DNA, 69 bp, synthetic construct
  source 1..69: mol_type = other DNA
tatgttgcatttacaagagctaaagaaaaattgattataactggttctactagaaatatacaagatagt

SEQ ID NO: 293 - RNA, 119 nt, synthetic construct
  source 1..119: mol_type = other RNA
gaaccgtaggaactatggggatagcttggtaaatttagttggctaacaaaagcaactattacccaagaaccccgcgactcctgcactcatagggtgtcagttgtgggaggttcagnnnn

SEQ ID NO: 294 - DNA, 56 bp, synthetic construct
  source 1..56: mol_type = other DNA
acccagaaccccgcgactcctgcactcatagggtgtcagttgtggaggttcagnnn

SEQ ID NO: 295 - DNA, 36 bp, synthetic construct
  source 1..36: mol_type = other DNA
ctaactaagatgggtaattaaactgttataacaaat

SEQ ID NO: 296 - DNA, 53 bp, synthetic construct
  source 1..53: mol_type = other DNA
tgatcgaatttgggtaacaaaactgttacaataaatttggataaatctatgca

SEQ ID NO: 297 - DNA, 53 bp, synthetic construct; identical to SEQ ID NO: 296
  source 1..53: mol_type = other DNA

SEQ ID NO: 298 - DNA, 53 bp, synthetic construct
  source 1..53: mol_type = other DNA
gtttaatcaatgggtaacaaaactgttacaacaaatttaaataaatctacgca

SEQ ID NO: 299 - DNA, 53 bp, synthetic construct
  source 1..53: mol_type = other DNA
tgaaacttcatgggtaactaaattgttgcaacaaatttaaacaaaaatataca

SEQ ID NO: 300 - DNA, 53 bp, synthetic construct
  source 1..53: mol_type = other DNA
atgaaatttatgggtaactaaactgttacaataaatttaaacaaaactataca

SEQ ID NO: 301 - DNA, 53 bp, synthetic construct
  source 1..53: mol_type = other DNA
aaataaaaagtgggtaactaaactgttacaacaaatttaaacaaaactataca

SEQ ID NO: 302 - DNA, 53 bp, synthetic construct
  source 1..53: mol_type = other DNA
ccgtgtcgattgggtaacagaactgttgcagtaaatttagataaaactataca

SEQ ID NO: 303 - DNA, 53 bp, synthetic construct
  source 1..53: mol_type = other DNA
cttataaatatgggtaactaaactgttgcgacaaatttagacaaacctataca

SEQ ID NO: 304 - DNA, 53 bp, synthetic construct
  source 1..53: mol_type = other DNA
cagaataacatgggtaactaaacagttactaaaaatgtataaaaattgatagc

SEQ ID NO: 305 - DNA, 50 bp, synthetic construct
  source 1..50: mol_type = other DNA
gtctacatttaaatagaaatgtatatatttttcgtatcggttgtgaattt

SEQ ID NO: 306 - DNA, 50 bp, synthetic construct
  source 1..50: mol_type = other DNA
ataaatattcaattagaaatgtatatatttttcgcatcggattaaagagc

SEQ ID NO: 307 - DNA, 50 bp, synthetic construct
  source 1..50: mol_type = other DNA
ataaatattcaattagaaatgtatatatttttcgcatcgggttaaagagc

SEQ ID NO: 308 - DNA, 50 bp, synthetic construct
  source 1..50: mol_type = other DNA
ataaatatttaaatagaaatgtatatatttttcgcatcggagcagattcc

SEQ ID NO: 309 - DNA, 51 bp, synthetic construct
  source 1..51: mol_type = other DNA
gtgctacatttaaatagaaatgtatatatttttcgtatcggattttaaaac

SEQ ID NO: 310 - DNA, 50 bp, synthetic construct
  source 1..50: mol_type = other DNA
gtctacatttaaatagaaatgtatatatttttcgtatcgggattgaaaaa

SEQ ID NO: 311 - DNA, 50 bp, synthetic construct
  source 1..50: mol_type = other DNA
gtctacatttaaatagaaatgtatatatttttcgtatcggatgagtttga

SEQ ID NO: 312 - DNA, 50 bp, synthetic construct
  source 1..50: mol_type = other DNA
gtctatatttttataaaaatgtatatatttttcgtatcgggtatccttta

SEQ ID NO: 313 - DNA, 50 bp, synthetic construct
  source 1..50: mol_type = other DNA
gtctacatttttttagaaatgtatatgtttttcgtatcggttcacgatgc

SEQ ID NO: 314 - DNA, 50 bp, synthetic construct
  source 1..50: mol_type = other DNA
atttatattttagtcaaaatgtatctatttttcgtatcggaatgtgaaaa

SEQ ID NO: 315 - protein, 10 aa, synthetic construct
ENKCYLLTKM

SEQ ID NO: 316 - protein, 10 aa, synthetic construct
CEFLANKFNG

SEQ ID NO: 317 - protein, 21 aa, synthetic construct
ENKCYLLTKMGCEGLANKFNG

SEQ ID NO: 318 - protein, 10 aa, synthetic construct
IALQNHMQNE

SEQ ID NO: 319 - protein, 10 aa, synthetic construct
KLKREKENLI

SEQ ID NO: 320 - protein, 21 aa, synthetic construct
IALQNHMQNEDKLKREKENLI

SEQ ID NO: 321 - DNA, 45 bp, synthetic construct
  source 1..45: mol_type = other DNA
aaagaaaacaaatgctatttgctaactaagatgggtaattaaact

SEQ ID NO: 322 - DNA, 44 bp, synthetic construct
  source 1..44: mol_type = other DNA
ttcgtatcggttgtgaatttttagccaataaatttaatggtgaa

SEQ ID NO: 323 - DNA, 69 bp, synthetic construct
  source 1..69: mol_type = other DNA
aaagaaaacaaatgctatttgctaactaagatgggttgtgaatttttagccaataaatttaatggtgaa

SEQ ID NO: 324 - DNA, 44 bp, synthetic construct
  source 1..44: mol_type = other DNA
tctattgctttacaaaatcatatgcaaaatgaggtaactaacag

SEQ ID NO: 325 - DNA, 45 bp, synthetic construct
  source 1..45: mol_type = other DNA
tatgcaacggataagctaaaaagagaaaaagagaacttgattaag

SEQ ID NO: 326 - DNA, 68 bp, synthetic construct
  source 1..68: mol_type = other DNA
tctattgctttacaaaatcatagcaaaatgaggataagctaaaaagagaaaaagagaacttgattaag

SEQ ID NO: 327 - RNA, 124 nt, synthetic construct
  source 1..124: mol_type = other RNA
agcgttggtgcctgcgggaatctcagacaccttaaacgctcatggaggctatgtcagacctgcttcggcgggcaatggtctgcgaagtgagaatcacgcgactttagtcgtgtgaggttcannn

SEQ ID NO: 328 - RNA, 148 nt, synthetic construct
  source 1..148: mol_type = other RNA
aacatggccgtgagttccacggtatcagcctgtggagaggaaggcactggccctcgtcgcaagacggcggtcaaaccggcctcggtgaagcaggaagtcagctttgaatctgttgaaacagatttgagtaggtatgacagaacggnnn

SEQ ID NO: 329 - RNA, 121 nt, synthetic construct
  source 1..121: mol_type = other RNA
tatgaaccgtaggaactatggggatagcttggtaaatttagttggctaacaaaagcaactattacccaagaaccccgcgactcctgcactcatagggtgtcagttgtgggaggttcagnnn

SEQ ID NO: 330 - RNA, 182 nt, synthetic construct
  source 1..182: mol_type = other RNA
tatgtacgtaacgatactacggaatttaagcctgttaagagtcatatcaaatggtagtagctttggcaaacccagattcgttgaagcaggaagacacaagacgaaaatcataagacataagtcgtgtcatagtataaatgtctacatttaaatagaaatgtatatatttttcgtatcggnnn

SEQ ID NO: 331 - DNA, 15 bp, synthetic construct
  source 1..15: mol_type = other DNA
ctaagatggtaatta

SEQ ID NO: 332 - DNA, 20 bp, synthetic construct
  source 1..20: mol_type = other DNA
tatcggttgtgaatttttag

SEQ ID NO: 333 - DNA, 27 bp, synthetic construct
  source 1..27: mol_type = other DNA
aactaagatgggttgtgaatttttagc

SEQ ID NO: 334 - DNA, 11 bp, synthetic construct
  source 1..11: mol_type = other DNA
atgggtaatta

SEQ ID NO: 335 - DNA, 20 bp, synthetic construct
  source 1..20: mol_type = other DNA
tatcggttgtgaatttttag

SEQ ID NO: 336 - DNA, 20 bp, synthetic construct
  source 1..20: mol_type = other DNA
ttcgtatcggtaattaaact

SEQ ID NO: 337 - DNA, 60 bp, synthetic construct; identical to SEQ ID NO: 63
  source 1..60: mol_type = other DNA

SEQ ID NO: 338 - DNA, 60 bp, synthetic construct
  source 1..60: mol_type = other DNA
ccgatacgaaaaatatatacatttctatttaaatgtagacatttatactatgacacgact

SEQ ID NO: 339 - DNA, 13 bp, synthetic construct
  source 1..13: mol_type = other DNA
gatgggttgtgaa

SEQ ID NO: 340 - DNA, 13 bp, synthetic construct
  source 1..13: mol_type = other DNA
ttcacaacccatc

SEQ ID NO: 341 - RNA, 11 nt, synthetic construct
  source 1..11: mol_type = other RNA
tcggttctcaa

SEQ ID NO: 342 - RNA, 11 nt, synthetic construct
  source 1..11: mol_type = other RNA
tcggggacaag

SEQ ID NO: 343 - RNA, 11 nt, synthetic construct
  source 1..11: mol_type = other RNA
tcgcggacaag

SEQ ID NO: 344 - RNA, 11 nt, synthetic construct
  source 1..11: mol_type = other RNA
tcgaggacaag

SEQ ID NO: 345 - RNA, 11 nt, synthetic construct
  source 1..11: mol_type = other RNA
tcgtggacaag

SEQ ID NO: 346 - DNA, 16 bp, synthetic construct
  source 1..16: mol_type = other DNA
ctaagatgggtaatta

SEQ ID NO: 347 - DNA, 19 bp, synthetic construct
  source 1..19: mol_type = other DNA
tatcggttgtgaattttta

SEQ ID NO: 348 - DNA, 27 bp, synthetic construct
  source 1..27: mol_type = other DNA
aactaagatgggttgtgaatttttagc

SEQ ID NO: 349 - protein, 10 aa, synthetic construct
PKKKRKVEDP

SEQ ID NO: 350 - protein, 9 aa, synthetic construct
PAAKRVKLD

SEQ ID NO: 351 - protein, 16 aa, synthetic construct
KRPAATKKAGQAKKKK

SEQ ID NO: 352 - protein, 25 aa, synthetic construct
MSRRRKANPTKLSENAKKLAKEVEN

SEQ ID NO: 353 - protein, 18 aa, synthetic construct
KRTADGSEFESPKKKRKV
